(19) United States
(12) Patent Application Publication
(10) Pub. No.: US 2012/0190577 A1
(43) Pub. Date: Jul. 26, 2012

(54) PROCESSES AND METHODS FOR DIAGNOSIS OF ALZHEIMER'S DISEASE

(75) Inventors: Rich Einstein, Gaithersburg, MD (US); Weiyin Zhou, Derwood, MD (US); Pascale Beurdeley, Fonteay Sous Bois (FR)

(73) Assignee: Exonhit SA, Paris (FR)

(21) Appl. No.: 13/387,148

(22) PCT Filed: Jul. 30, 2010
(86) PCT No.: PCT/EP2010/061087

§ 371 Date: Apr. 17, 2012

Related U.S. Application Data
(60) Provisional application No. 61/257,934, filed on Nov. 4, 2009.

(30) Foreign Application Priority Data
Jul. 31, 2009 (EP) 09305721.4

(51) Int. Cl. C40B 30/04; C12Q 1/68; C40B 40/06

(52) U.S. Cl. 506/9; 506/16; 435/6.12

(57) ABSTRACT

The present application relates to methods and compositions that can be used to diagnose Alzheimer's disease in mammals, most notably humans. Ti describes most notably peripheral blood biomarkers Alzheimer's disease and uses said biomarkers in diagnostic methods. It also relates to tools and/or kits that can be used to implement said methods (reagents, probes, primers, antibodies, arrays or chips, cells, etc.), as well as the preparation and use thereof. The invention can further be used to detect the presence or the advance of Alzheimer's disease in mammals, including during the disease's early phase, as well as to predict the effectiveness of an Alzheimer's disease treatment.

[0001] The present application relates to methods and compositions of use in detecting Alzheimer's disease in mammals, in particular in humans. It describes most notably serum markers for Alzheimer's disease and the use thereof in diagnostic methods. It also relates to tools and/or kits of use in implementing said methods (reagents, probes, primers, antibodies, chips or arrays, cells, etc.), and the preparation and use thereof. The invention can be used to detect the presence or progression of Alzheimer's disease in mammals, including in the disease's early phase (including at pre-symptomatic or pre-AD stage).

[0002] Alzheimer's disease is the principal cause of dementia and the most common neurodegenerative disease. This disease, which develops progressively, is characterised by memory loss and by a degradation of aptitudes for language, orientation and judgement. The nature of the symptoms, often confused with physiological troubles related to old age, their severity and the age at which they appear vary from individual to individual. This contributes to the difficulty in diagnosing the early stages of the disease.

[0003] Examination of the brains of patients suffering from this disease reveals a loss of neurones in the hippocampus, an important region for memory, and in the cerebral cortex, which is involved in reasoning, language and memory. Cholinergic neurones are particularly affected by this depletion.

[0004] Another major anomaly observed in the brains of Alzheimer's patients is the accumulation of intracellular and extracellular protein aggregates. Intracellular neurofibrillary aggregates of tau protein appear strongly correlated with dementia severity. Senile plaques formed by the intracellular and extracellular aggregation of beta-amyloid peptide are characteristic of regions in which neurons and glial cells are affected.

[0005] It is, however, remarkable to note that these regions of aggregation do not correspond to the sites of synapse depletion characteristic of cognitive function decline.

[0006] Genetic studies undertaken on familial forms showed that four genes are associated with development of the disease: APP (amyloid precursor protein; precursor of beta-amyloid peptide), presenilins 1 and 2 (PS1 and PS2) and apolipoprotein E (ApoE). Although mutations or polymorphisms in each of these genes can lead to increased production of beta-amyloid peptide, the mechanisms that govern synaptic and neuronal losses remain poorly understood. In this respect, several hypotheses and mechanisms appear to coexist, thus implying various phenomena:

[0007] 1 Purely cerebral phenomena involving neurones and glial cells:
[0008] oxidative stress, which can be induced most notably by beta-amyloid peptide and modulated by cholesterol metabolism;
[0009] changes in calcium flow and excitotoxicity.

[0010] 2 Inflammatory and immune reaction phenomena;

[0011] 3 Changes in sex hormones;

[0012] 4 Hypothyroidism and defects in the regulation of insulin signalling.

[0013] Consequently, Alzheimer's disease is characterised by a change in various systems integrating homeostasis control, the attack on certain neurones leading both to an inflammatory reaction involving the immune system and to changes in endocrine regulation. In return, the latter have an impact on the activity and viability of other neurones and on immune functions, these cascading reactions underlining the role not only of neurodegeneration but also of hormone regulation and immune response in the advance of Alzheimer's disease.

[0014] Currently there is no robust and specific signature of Alzheimer's disease, most notably from a blood sample, for establishing a diagnosis of this pathology, most notably of the various stages of the disease. Providing an effective diagnostic test, in particular of the early stages of the disease, would enable patients to be treated from the onset of the disease and thus to benefit from a more effective and more tailored treatment, in particular by acetylcholinesterase inhibitors such as galantamine, donepezil and rivastigmine, under optimal conditions.

[0015] The present invention provides a response to this need. The invention describes in particular the identification of serum markers for Alzheimer's disease, enabling the development of effective and predictive diagnoses of the presence, severity or advance, or of the risk of developing this disease. The invention thus describes the identification of molecular signatures specifically or preferentially expressed in the blood of patients suffering from Alzheimer's disease, resulting most notably from the complex expression of certain genes undergoing alternative splicing. The invention describes most notably the identification of sequences SEQ ID NOS.: 1-1754, which are present in genes or RNA of blood cells from human subjects, and which are characteristic, alone or in combination, of Alzheimer's disease. The invention can thus provide tools and methods for diagnosing, predicting and/or monitoring the progression of Alzheimer's disease, based on measuring, in the blood of subjects, the expression of one or more genes. The presence of deregulation in the expression of such genes is used to establish (or to confirm) the presence of Alzheimer's disease in a subject.

[0016] An object of the invention thus resides in a method to detect or to confirm (in vitro or ex vivo) the presence of Alzheimer's disease in a mammal, comprising the determination of the presence, in a biological sample from the mammal, preferably in a sample (derived) of blood, of a change in the expression of one or more genes or RNAs comprising a sequence selected from SEQ ID NOS.: 1-1754, the presence of such a change being indicative of the presence or risk of developing Alzheimer's disease in this mammal.

[0017] Another object of the invention relates to a method to evaluate or monitor the response to a treatment for Alzheimer's disease, comprising a step of measuring the expression of one or, preferably, several genes or RNAs comprising a sequence selected from SEQ ID NOS.: 1 to 1754 before and/or during treatment, and a comparison of the expression thus measured with that measured before treatment or at a earlier stage of treatment, a change in said expression being indicative of a response to the treatment.

[0018] Another object of the invention relates to an improvement in the methods of treating Alzheimer's disease, the improvement consisting in measuring the expression of one or, preferably, several genes or RNAs comprising a sequence selected from SEQ ID NOS.: 1 to 1754, in a subject, before and/or during treatment. Measuring expression makes it possible to adapt the treatment as a function of the evolution of the pathology. The treatment is typically a treatment with acetylcholinesterase inhibitors, such as galantamine, donepezil and rivastigmine.

[0019] Another object of the invention relates to the use of an acetylcholinesterase inhibitor, such as galantamine, donepezil and rivastigmine, to prepare a drug to treat Alzheimer's disease in a patient exhibiting deregulation of the expression of at least one gene as previously defined.

[0020] A change in a gene or RNA designates, in the context of the invention, (i) any change in the expression, namely deregulation of expression levels (e.g., of transcription or translation), deregulation of splicing, leading for example to the appearance of particular spliced forms or a change in the (relative) quantity or the ratio between the various splicing forms; as well as (ii) any change in the structure of the protein produced (appearance or disappearance of truncated, extended or mutated forms, etc.).

[0021] As will be described in the text below, the present application describes the identification of changes in splicing among certain genes in the blood of patients suffering from Alzheimer's disease. Any molecule or technique used to measure the expression of these genes in the blood can be implemented within the scope of this invention, such as nucleotide primers, nucleotide probes or specific antibodies, which can be in suspension or in immobilised form, as will be described in detail in the text below.

[0022] Thus, another object of the present application relates to a product comprising a support on which are immobilised nucleic acids comprising a sequence complementary to and/or specific of one or, preferably, several genes or RNAs such as previously defined. Preferably, the product includes distinct nucleic acids comprising a complementary and/or specific sequence of at least 5, 10, 20, 30, 40, 50, 60, 100, 150, 200 or more genes or RNAs such as previously defined.

[0023] Another object of the present application relates to a product comprising a support on which at least one ligand of a polypeptide coded by a gene or RNA such as defined above is immobilised. Preferably, the product comprises at least 5, 10, 20, 30, 40, 50, 60 or more ligands of various polypeptides selected from the polypeptides mentioned above.

[0024] Another object of the present application relates to a kit comprising a compartment, or a box, or container comprising at least one nucleic acid, preferably several, comprising a complementary and/or specific sequence of one or more genes or RNAs such as previously defined and/or one ligand, preferably several, of one or more polypeptides such as previously defined. Preferably, the product comprises at least 5, 10, 20, 30, 40, 50, 60, 100, 150, 200 or more sequences of various nucleic acids and/or ligands selected from the nucleic acids and ligands mentioned above. The kit can further include reagents for a hybridisation or immunological reaction, as well as, if need be, controls and/or instructions.

[0025] Another object of the invention relates to the use of a product or kit such as defined above for detecting Alzheimer's disease in a mammalian subject, preferably a human subject.

[0026] Another object of the invention relates to the use of a product or kit such as defined above for determining the response to a treatment for Alzheimer's disease or for selecting subjects likely to respond well to a treatment.

[0027] Another object of the invention resides in an isolated nucleic acid comprising a sequence selected from SEQ ID NOS.: 1 to 1754 or a fragment thereof having at least 15, 16, 17, 18, 19 or 20 consecutive bases, or a sequence complementary to said bases. Preferably, the inventive nucleic acid does not comprise the complete sequence of a natural gene or RNA. Preferably, it comprises no more than 500 bases, preferably no more than 400 or 300 bases. The inventive nucleic acid is typically synthetic, that is to say, is produced by a non-natural technique (recombinant, in vitro, chemical synthesis, etc.). Examples of nucleic acids of this invention are probes or primers having a length of between 10 and 30 bases, typically.

[0028] Another object of the invention resides in a polypeptide coded by a nucleic acid such as defined above.

[0029] Markers for Alzheimer's disease

[0030] The present invention rests on revealing and characterising biological events characteristic of Alzheimer's disease in human patients, more specifically from peripheral blood cells. These events constitute biomarkers that, when detected in a patient, preferably in combination, make it possible to determine, even at an early stage, the presence of one such disease, or the developmental stage of this disease. Moreover, the inventive markers also can be used to measure the response to a treatment, and/or to select drug candidates.

[0031] The identified biological events typically relate to changes in the regulation of gene expression. It can be an issue of partial or total inhibition of the expression of genes or RNAs, or certain forms of genes or RNAs; an increase in the expression of genes or of certain forms of genes or RNAs; or the appearance or disappearance of forms of gene splicing, etc.

[0032] The invention thus rests on detecting, in a sample, one or more target molecules advantageously selected among:
[0033] a) nucleic acids comprising a sequence selected from SEQ ID NOS.: 1 to 1754, or a distinctive fragment thereof having at least 15, preferably at least 16, 17, 18, 19, 20, 25 or 30 consecutive bases,
[0034] b) nucleic acids having a sequence complementary to a sequence according to a),
[0035] c) functional analogues of nucleic acids according to a) or b), or
[0036] d) polypeptides coded by the nucleic acids according to a) to c).

[0037] Nucleic acids of sequences SEQ ID NOS.: 1-1754 were identified by the inventors from samples of blood cells from healthy human subjects or from subjects with Alzheimer's disease, by transcriptome analysis techniques. These sequences are characteristic, in combinations, of Alzheimer's disease. These sequences are designated in the present application as “target” sequences. They are presented in the biological sense of the gene. Their sequence is given in the sequence listing, and they are described in table 1.

[0038] The term “functional analogue” preferably indicates a polymorphic variant of sequences SEQ ID NOS: 1 to 1754 present among the human population. In most cases, these polymorphisms are represented by specific variations on the base level, even if other polymorphic configurations also exist. These analogues can be identified by any technique known to those persons skilled in the art, most notably in consideration of the sequences provided in the application and the names of the corresponding genes.

[0039] In a particular embodiment, the method comprises the determination of the presence (or the absence or a variation of expression level) of at least one nucleic acid according to a) to c).

[0040] In a very specific embodiment, the method is used to detect Alzheimer's disease in a human subject and comprises the determination of the presence (or the absence or a variation of expression level) of at least one nucleic acid according to a) to c).

[0041] In a particular alternate implementation, the method comprises the combined determination of the presence or absence or (relative) quantity of at least 5, 10, 15, 20, 30, 40, 50, 60, 70 or more of the target molecules such as defined above. “Combined” determination indicates the fact that an expression (or hybridisation) profile (or signature) involving several markers is established. Combined determination is typically performed simultaneously, that is to say, via a comprehensive expression profile. Nevertheless, the combined determination can also be performed by parallel or sequential measurements of several markers, leading to the identification of a profile. Indeed, the invention makes it possible to establish and to determine an expression profile (or a signature) on a set of markers, in order to evaluate the presence or the risk of developing Alzheimer's disease in a mammal. The expression profile is typically performed using a combination of several markers selected from the targets indicated above, for example containing all of these targets.

[0042] In a particular embodiment, the inventive method comprises the determination of the presence (or absence or (relative) quantity), in a biological sample from a mammal, of at least 5 distinct target molecules selected from those defined above, preferably at least 10.

[0043] In this respect, the present application describes specific subsets (panels) of target molecules selected from those defined above, which are particularly adapted to the detection of the presence of Alzheimer's disease in patients from a sample of whole blood.

[0044] Thus, in a specific embodiment, the inventive method comprises the combined determination of the presence or absence or relative quantity, in a biological sample from a mammal, of nucleic acids of all of a panel's targets comprising markers as defined in items a) to d) above, preferably all of the nucleic acids of one of the panels 1 to 16 defined in the present application (see table 2).

[0045] Thus, in a particular embodiment, the inventive method comprises the combined determination of the presence (or absence or (relative) quantity), in a biological sample from a mammal, of all of the nucleic acids of one of panels 1 to 14, or a distinctive fragment thereof having at least 15, preferably at least 16, 17, 18, 19, 20, 25 or 30 consecutive bases, or having a sequence complementary thereto and/or functional analogues thereof, and/or polypeptides coded by said nucleic acids. The examples provided in the present application indeed show that these panels of markers predictively detect the presence or the stage of advance of Alzheimer's disease. In a particular embodiment, the method further comprises the detection of one or more other target molecules such as previously defined.

[0046] In a specific embodiment, the inventive method comprises the determination of the presence (or absence or (relative) quantity), in a biological sample from a mammal, of nucleic acids comprising respectively the sequences represented in SEQ ID NOS.: 1 to 1754 or a distinctive fragment thereof having at least 15, preferably at least 16, 17, 18, 19, 20, 25 or 30 consecutive bases, or nucleic acids having a sequence complementary thereto.

[0047] A particular object of the invention resides in a method to detect the presence of Alzheimer's disease in a mammal, comprising contacting, under conditions that allow hybridisation between complementary sequences, nucleic acids from a blood sample from a mammal and a set of probes, the set of probes comprising at least one probe comprising all or part of each of the following target nucleic acid sequences, or of their complementary strand: SEQ ID NOS.: 34, 230, 341, 454, 664, 811, 951, 1127, 1136 and 1752, to obtain an expression profile, the expression profile being characteristic of the presence of Alzheimer's disease in the mammal. In other words, the set of probes comprises:
[0048] at least one probe comprising all or part of SEQ ID NO: 34 or of the complementary strand thereof;
[0049] at least one probe comprising all or part of SEQ ID NO: 230 or of the complementary strand thereof;
[0050] at least one probe comprising all or part of SEQ ID NO: 341 or of the complementary strand thereof;
[0051] at least one probe comprising all or part of SEQ ID NO: 454 or of the complementary strand thereof;
[0052] at least one probe comprising all or part of SEQ ID NO: 664 or of the complementary strand thereof;
[0053] at least one probe comprising all or part of SEQ ID NO: 811 or of the complementary strand thereof;
[0054] at least one probe comprising all or part of SEQ ID NO: 951 or of the complementary strand thereof;
[0055] at least one probe comprising all or part of SEQ ID NO: 1127 or of the complementary strand thereof;
[0056] at least one probe comprising all or part of SEQ ID NO: 1136 or of the complementary strand thereof; and
[0057] at least one probe comprising all or part of SEQ ID NO: 1752 or of the complementary strand thereof.

[0058] In a preferred embodiment of the method, the set of probes comprises, in addition to the probes indicated above, at least one probe comprising all or part of each of the following additional target nucleic acid sequences, or of their complementary strand: SEQ ID NOS.: 35, 316, 593, 666, 855, 1330 and 1498.

[0059] Thus, a preferred panel of target nucleic acids comprises at least the nucleic acids comprising sequences SEQ ID NOS.: 34, 35, 230, 316, 341, 454, 593, 664, 666, 811, 855, 951, 1127, 1136, 1330, 1498 and 1752, or their complementary sequence. As illustrated in the examples, various panels of markers were revealed and validated clinically by the inventors, allowing a determination of the presence of Alzheimer's disease in a subject. Panels 15 and 16 defined above comprise a set of markers common to all the significant panels 1-14 described and tested clinically in the present application, and thus constitute two subsets that are particularly informative and representative for detecting Alzheimer's disease.

[0060] In a particularly preferred manner, the set of probes comprises at least one specific probe for each nucleic acid of one of the panels 1 to 14 defined in table 2, or for a distinctive fragment thereof having at least 15, preferably at least 16, 17, 18, 19, 20, 25 or 30 consecutive bases, and/or for a complementary strand thereto.

[0061] In addition, as will be explained in more detail in the text below, advantageous use is made of probe sets comprising, for each nucleic acid target sequence, several specific probes that are partially overlapping or not overlapping, typically from 1 to 3. In addition, the probes are advantageously immobilised on a support. Moreover, the expression profile is generally analysed by computer software.

[0062] Another object of the invention resides in a method to detect the presence or the risk of developing Alzheimer's disease in a mammal, the method comprising detection, from a blood sample from a mammal, of a variation in the levels of nucleic acids complementary to a group of probes such as defined previously, variation being characteristic of the presence of Alzheimer's disease in a mammal.

[0063] The invention also makes it possible to define additional panels, comprising at least certain markers such as previously defined, which optionally can be combined with other markers. Such panels can be obtained by testing the presence or absence of these markers in patient samples, to define other predictive combinations.

[0064] The invention further relates to the use of a set of probes such as defined previously to detect in vitro or ex vivo the presence of Alzheimer's disease in a subject.

[0065] The invention further relates to the use of a set of primers comprising at least one primer comprising all or part of one or more nucleic acid sequence targets mentioned previously, for in vitro or ex vivo detection of Alzheimer's disease.

[0066] The invention also relates to a method to detect the presence of Alzheimer's disease in a mammal, comprising contacting, under conditions allowing an amplification reaction, nucleic acids from a blood sample from a mammal and a set of primers, the set of primers comprising at least one primer comprising all or part of each of the following nucleic acid sequences, or of the complementary strand thereof: SEQ ID NOS.: 34, 230, 341, 454, 664, 811, 951, 1127, 1136 and 1752, to obtain a profile or amplification product, the profile or amplification product being characteristic of the presence of Alzheimer's disease in a mammal.

[0067] Methods for Detecting a Change in Gene Expression

[0068] As indicated previously, a change in a gene or RNA indicates in the context of the invention (i) any change in expression, namely deregulation of expression levels (e.g., of transcription or translation), deregulation of splicing, leading for example to the appearance of particular spliced forms or a change in the (relative) quantity of or relationship between various splicing forms, and (ii) any change in the structure of the protein produced (appearance or disappearance of truncated, extended or mutated forms, etc.).

[0069] Various techniques for detecting a species of nucleic acid in a sample can be used in the present invention, such as for example northern blot, selective hybridisation, the use of supports covered with oligonucleotide probes, nucleic acid amplification such as for example RT-PCR, quantitative PCR or ligation-PCR, etc. These methods can include the use of a nucleic probe (for example an oligonucleotide) capable of detecting selectively or specifically the nucleic acid targets in the sample. Amplification can be performed according to various methods known to the person skilled in the art, such as PCR, LCR, transcription mediated amplification (TMA), strand displacement amplification (SDA), NASBA, the use of allele specific oligonucleotides (ASO), allele specific amplification. Detection can also be made using, e.g., Southern blot, single-strand conformation analysis (SSCA), in situ hybridisation (e.g., FISH), gel migration, heteroduplex analysis, NextGen sequencing, etc. If necessary, the quantity of nucleic acid detected can be compared with a reference value, for example a median or mean value observed among patients who do not have Alzheimer's disease, or with a value measured in parallel in a control sample. Thus, it is possible to demonstrate variation in expression levels.

[0070] According to a preferred embodiment, the method comprises detection of the presence or absence or (relative) quantity of a nucleic acid according to a) to c) by selective hybridisation or selective amplification.

[0071] Selective hybridisation is typically performed using nucleic probes, preferably immobilised on a support, such as a solid or semi-solid support having at least one surface, flat or not, for immobilising nucleic probes. Such supports are, for example, a slide, bead, membrane, filter, column, plate, etc. They can be made out of any compatible material, such as in particular glass, silica, plastic, fiber, metal, polymer, etc. The nucleic probes can be any acid nucleic (DNA, RNA, PNA, etc.), preferably single-strand, comprising a specific sequence of a target molecule such as defined in a) to c) above. The probes typically comprise from 5 to 400 bases, preferably from 8 to 200, more preferentially less than 100, and even more preferentially less than 75, 60, 50, 40 or even 30 bases. The probes can be synthetic oligonucleotides, produced on the basis of inventive sequences SEQ ID NO: 1 to 1754 (target sequences), according to standard synthesis techniques. Such oligonucleotides typically comprise from 10 to 50 bases, preferably from 20 to 40, for example approximately 25 bases. In a particularly advantageous embodiment, so as to improve the detected signal, several different oligonucleotides (or probes) defined from the same target sequence are used to detect the same target molecule (transcribed from the amplification of the patient's RNA to produce either cRNA or cDNA) during hybridisation. This may include specific oligonucleotides of various regions of the same target sequence, or centred differently on a given region. Advantageously, use is made of probe sets comprising 1-3 probes, which can be overlapping or not, wholly or partly, and which are specific for the same target molecule. Use can also be made of probe pairs, in which one member is paired perfectly with the target sequence, and the other presents a mismatch, thus making it possible to estimate background signal. Probes can be designed to hybridise with a region of an exon or an intron, or with an exon-exon, exon-intron or intron-intron junction region. Thus, the probes make it possible to reveal and to distinguish various alternative spliced isoforms.

[0072] In a preferred embodiment, use is made of probes whose sequence comprises all or part of a nucleic acid sequence selected from SEQ ID NOS.: 1 to 1754 or of a sequence complementary thereto. In a preferred mode, use is made of nucleic acid probes having a length between 15 and 50 bases, more preferentially between 15 and 40 bases, and whose sequence is identical to a fragment of a sequence selected from SEQ ID NO: 1 to 1754 or of a sequence complementary thereto. The probe can also be designed in the opposite orientation.

[0073] In a particularly preferred embodiment, use is made of probe sets, that is to say, sets of 1-3 probes each comprising a section, overlapping or not, of the same nucleic acid sequence selected from SEQ ID NOS.: 1 to 1754 or of the complementary strand thereof.

[0074] The probes can be synthesised in advance and then deposited on the support, or synthesised directly in situ, on the support, according to methods known to the person skilled in the art. The probes can also be manufactured by genomic or molecular techniques, for example by amplification, recombination, ligation, etc.

[0075] The probes thus defined constitute another object of the present application, as well as the use thereof (primarily in vitro) for detecting Alzheimer's disease in a subject.

[0076] Hybridisation can be performed under standard conditions, known to and adjustable by the person skilled in the art (see Sambrook, Fritsch, Maniatis (1989) Molecular Cloning, Cold Spring Harbor Laboratory Press). Most notably, hybridisation can be performed under conditions of high, medium or low stringency, according to the level of sensitivity needed, the quantity of material available, etc. For example, suitable hybridisation conditions include a temperature between 55° C. and 63° C. for 2 hours to 18 hours. Other hybridisation conditions, adapted to high density supports, are for example a hybridisation temperature between 45° C. and 55° C. After hybridisation, various washes can be performed to eliminate the non-hybridised molecules, typically in SSC buffers including SDS, such as a buffer comprising 0.1× to 10×SSC and 0.5% to 0.01% SDS. Other wash buffers containing SSPE, MES, NaCl or EDTA can also be used.

[0077] In a typical embodiment, the nucleic acids (or arrays or supports) are pre-hybridised in hybridisation buffer (Rapid Hybrid Buffer, Amersham) typically containing 100 μg/ml of salmon sperm DNA at 65° C. for 30 min. The nucleic acids of the sample are then placed in contact with the probes (typically applied to the support or the array) at 65° C. for 2 hours to 18 hours. Preferably, the nucleic acids of the sample are marked beforehand by any known marker (biotin, radioactive, enzymatic, fluorescent, luminescent, etc.). The supports are then washed in 5×SSC, 0.1% SDS buffer at 65° C. for 30 min., then in a 0.2×SSC, 0.1% SDS buffer. The expression profile is analysed according to standard techniques, such as for example by measuring labelling on the support by means of a suitable instrument (for example InstantImager, Packard Instruments). Hybridisation conditions naturally can be adjusted by the person skilled in the art, for example by modifying hybridisation temperature and/or the salt concentration of the buffer as well as by adding auxiliary substances such as formamide or single-strand DNA.

[0078] A particular object of the invention thus resides in a method to detect the presence or the risk of developing Alzheimer's disease in a mammal, or to evaluate the response to a treatment against Alzheimer's disease, comprising contacting, under conditions allowing hybridisation between complementary sequences, nucleic acids from a blood sample from a mammal and a set of probes specific of the target molecules identified previously to obtain an expression profile, the expression profile being characteristic of the presence or the risk of developing Alzheimer's disease in a mammal, or of the effectiveness of the treatment.

[0079] A particular object of the invention thus resides in a method to detect the presence of Alzheimer's disease in a mammal, comprising contacting, under conditions allowing hybridisation between complementary sequences, nucleic acids from a blood sample from a mammal and a set of probes specific of the following target molecules at least:
[0080] a) nucleic acids comprising the sequences of one of the panels 1 to 14 previously defined, or a distinctive fragment thereof having at least 15, preferably at least 16, 17, 18, 19, 20, 25 or 30 consecutive bases, and/or,
[0081] b) nucleic acids having a sequence complementary to sequences according to a), and/or,
[0082] c) functional analogues of the nucleic acids according to a) or b),
   to obtain an expression profile, the expression profile being characteristic of the presence of Alzheimer's disease in a mammal.

[0083] In the specific embodiments, the inventive processes use in addition other target molecules and/or other probes, most notably the target molecule subsets mentioned in the present application.

[0084] Thus, another particular object of the invention resides in a method to detect the presence or the risk of developing Alzheimer's disease in a mammal, comprising contacting, under conditions allowing hybridisation between complementary sequences, nucleic acids from a blood sample from a mammal and a set of probes specific of at least two distinct molecules selected from the following targets:
[0085] a) nucleic acids comprising the sequences represented in SEQ ID NOS.: 1 to 1754 or a distinctive fragment thereof having at least 15, preferably at least 16, 17, 18, 19, 20, 25 or 30 consecutive bases, and/or,
[0086] b) nucleic acids having a sequence complementary to sequences according to a), and/or,
[0087] c) functional analogues of the nucleic acids according to a) or b),
   to obtain an expression profile, the expression profile being characteristic of the presence of Alzheimer's disease in a mammal.

[0088] Another particular object of the invention resides in a method to detect the presence of Alzheimer's disease in a mammal, comprising contacting, under conditions allowing hybridisation between complementary sequences, the nucleic acids from a blood sample from a mammal and a set of probes, the set of probes comprising at least one probe comprising all or part of each nucleic acid sequence of one of panels 1-16 or of a sequence complementary thereto to obtain an expression profile, the expression profile being characteristic of the presence of Alzheimer's disease in a mammal.

[0089] As explained in further detail in the experimental section, a preferred set according to the invention comprises at least the following probes:
[0090] from 1 to 3 probes, overlapping or not, each comprising all or part of sequence SEQ ID NO: 34 or of a sequence complementary thereto;
[0091] from 1 to 3 probes, overlapping or not, each comprising all or part of sequence SEQ ID NO: 230 or of a sequence complementary thereto;
[0092] from 1 to 3 probes, overlapping or not, each comprising all or part of sequence SEQ ID NO: 341 or of a sequence complementary thereto;
[0093] from 1 to 3 probes, overlapping or not, each comprising all or part of sequence SEQ ID NO: 454 or of a sequence complementary thereto;
[0094] from 1 to 3 probes, overlapping or not, each comprising all or part of sequence SEQ ID NO: 664 or of a sequence complementary thereto;
[0095] from 1 to 3 probes, overlapping or not, each comprising all or part of sequence SEQ ID NO: 811 or of a sequence complementary thereto;
[0096] from 1 to 3 probes, overlapping or not, each comprising all or part of sequence SEQ ID NO: 951 or of a sequence complementary thereto;
[0097] from 1 to 3 probes, overlapping or not, each comprising all or part of sequence SEQ ID NO: 1127 or of a sequence complementary thereto;
[0098] from 1 to 3 probes, overlapping or not, each comprising all or part of sequence SEQ ID NO: 1136 or of a sequence complementary thereto; and
[0099] from 1 to 3 probes, overlapping or not, each comprising all or part of sequence SEQ ID NO: 1752 or of a sequence complementary thereto.

[0100] As indicated previously, the term “part” advantageously indicates a region of 15 to 50 consecutive nucleotides.

[0101] It is understood that the set can comprise, in addition to the 10 probes or groups of probes (probe sets) cited, other probes or probe sets, comprising for example a sequence selected from SEQ ID NO: 1 to 1754 and/or among other sequences.

[0102] Thus, another preferred set according to the invention comprises, in addition to the probes mentioned above, at least the following additional probes:
[0103] from 1 to 3 probes, overlapping or not, each comprising all or part of sequence SEQ ID NO: 35 or of a sequence complementary thereto;
[0104] from 1 to 3 probes, overlapping or not, each comprising all or part of sequence SEQ ID NO: 316 or of a sequence complementary thereto;
[0105] from 1 to 3 probes, overlapping or not, each comprising all or part of sequence SEQ ID NO: 593 or of a sequence complementary thereto;
[0106] from 1 to 3 probes, overlapping or not, each comprising all or part of sequence SEQ ID NO: 666 or of a sequence complementary thereto;
[0107] from 1 to 3 probes, overlapping or not, each comprising all or part of sequence SEQ ID NO: 855 or of a sequence complementary thereto;
[0108] from 1 to 3 probes, overlapping or not, each comprising all or part of sequence SEQ ID NO: 1330 or of a sequence complementary thereto; and
[0109] from 1 to 3 probes, overlapping or not, each comprising all or part of sequence SEQ ID NO: 1498 or of a sequence complementary thereto.

[0110] Panels 1-14 can be defined like the set above. The basic probes constituting these sets are given in the examples.

[0111] Another object of the invention resides in a method to detect the presence or the risk of developing Alzheimer's disease in a mammal, comprising the detection, from a blood sample from a mammal, of a variation in the levels of nucleic acids complementary to a set of probes, the set of probes comprising at least one probe comprising all or part of each nucleic acid sequence of one of the panels defined previously, a variation being characteristic of the presence or the risk of developing Alzheimer's disease in a mammal.

[0112] The expression profile can be compared with one or more basic profiles, most notably a basic profile characteristic of healthy subjects and/or subjects with Alzheimer's disease, the comparison making it possible to determine the probability that the patient tested has Alzheimer's disease. Typically, the comparison is performed by means of computer software known to the person skilled in the art.

[0113] Selective amplification is preferably performed using a primer or a pair of primers to amplify all or part of one of the target nucleic acids in the sample, when the target nucleic acid is present. The primer can be specific for a target sequence such as previously defined according to SEQ ID NO: 1 to 1754, or of a region flanking the target sequences in a nucleic acid of the sample. The primer typically comprises a single-strand nucleic acid, with a length advantageously between 5 and 50 bases, preferably between 5 and 30 bases. Such a primer constitutes another object of the present application, as well as the use thereof (primarily in vitro) for detecting Alzheimer's disease in a subject. The primers can be designed to hybridise with a region of an exon or an intron, or with an exon-exon, exon-intron or intron-intron junction region. Thus, the primers reveal and distinguish various forms of gene splicing.

[0114] In this respect, another object of the invention resides in the use of a nucleotide primer or a set of nucleotide primers to amplify all or part of one or, preferably, several genes or RNAs comprising a target sequence according to SEQ ID NO: 1 to 1754, to detect the presence of Alzheimer's disease in a mammal, or to evaluate the response to a treatment against Alzheimer's disease in a mammal, particularly in a human being.

[0115] Another specific object of the invention resides in a method to detect the presence of Alzheimer's disease in a mammal, comprising contacting, under conditions allowing amplification, nucleic acids from a blood sample from a mammal and a set of primers specific of at least two distinct molecules selected from the following targets:
[0116] a) nucleic acids comprising the sequences represented in SEQ ID NOS.: 1 to 1754 or a distinctive fragment thereof having at least 15, preferably at least 16, 17, 18, 19, 20, 25 or 30 consecutive bases, and/or,
[0117] b) nucleic acids having a sequence complementary to sequences according to a), and/or,
[0118] c) functional analogues of the nucleic acids according to a) or b),
   to obtain an amplification profile, the amplification profile being characteristic of the presence of Alzheimer's disease in a mammal.

[0119] Detection of a Change in a Polypeptide

[0120] In another embodiment, the method comprises the determination of the presence or the (relative) quantity of a polypeptide coded by a gene such as defined previously. Revealing or assaying a polypeptide in a sample can be performed by any known technique, most notably by means of a specific ligand, for example an antibody or an antibody fragment or derivative. Preferably, the ligand is a specific antibody of the polypeptide, or a fragment of such an antibody (for example Fab, Fab', CDR, etc.), or a derivative of such an antibody (for example a single-chain variable-fragment antibody, scFv). The ligand is typically immobilised on a support, such as a slide, bead, column, plate, etc. The presence or quantity of target polypeptide in the sample can be detected by revealing a complex between the target and the ligand, for example by using a labelled ligand or by using a second labelled indicator ligand, etc. Immunological techniques that can be used and are well known are ELISA and RIA techniques, etc. If necessary, the quantity of polypeptide detected can be compared with a reference value, for example a median or mean value observed among patients who do not have Alzheimer's disease, or with a value measured in parallel in a control sample. Thus, it is possible to reveal variation in expression levels.

[0121] Specific antibodies of target polypeptides can be produced by conventional techniques, most notably by immunization of a non-human animal with an immunogen comprising the polypeptide (or an immunogenic fragment thereof), and recovery of the antibodies (polyclonal) or producing cells (to produce monoclonal antibodies). Production techniques for polyclonal or monoclonal antibodies, single-chain variable-fragment antibodies and human or humanised antibodies are described for example in Harlow et al., A Laboratory Manual, CSH Press, 1988; Ward et al., Nature 341 (1989) 544; Bird et al., Science 242 (1988) 423; WO 94/02602; U.S. Pat. No. 5,223,409; U.S. Pat. No. 5,877,293 and WO 93/01288. The immunogen can be produced by synthesis, or by expression, in a suitable host, of a nucleic acid target such as defined previously. Such an antibody, monoclonal or polyclonal, as well as derivatives thereof having the same antigenic specificity, also constitutes an object of the present application, as well as the use thereof to detect Alzheimer's disease.

[0122] Changes in protein expression and/or structure can also be detected by means of techniques, known to the person skilled in the art, involving mass spectroscopy, more generally grouped under the name proteome analysis, in order to detect specific signatures in the blood of patients suffering from Alzheimer's disease.

[0123] Implementation of the Method

[0124] The inventive method is applicable to any biological sample from the tested mammal, most notably any sample that includes nucleic acids or polypeptides. Specific examples include a sample of blood, plasma, platelets, saliva, urine, stool, etc., more generally any tissue, organ or, advantageously, biological fluid that includes nucleic acids or polypeptides.

[0125] In one preferred and particularly advantageous embodiment, the sample is a sample of blood derivative, for example a sample of blood, serum or plasma. Indeed, the invention follows from the identification of blood markers for Alzheimer's disease, and thus enables detection of this pathology without tissue biopsy, but from blood samples alone.

[0126] The sample can be obtained by any known technique, for example by drawing, by non-invasive techniques, or from sample collections or banks, etc. Further, the sample can be pre-treated to facilitate access to the target molecules, for example by lysis (mechanical, chemical, enzymatic, etc.), purification, centrifugation, separation, etc. The sample can also be labelled to facilitate the determination of the presence of target molecules (biotin, fluorescent, radioactive, luminescent, chemical or enzymatic labelling, etc.). The nucleic acids of the sample can in addition be separated, treated, enriched, purified, reverse transcribed, amplified, fragmented, etc. In a particular embodiment, the nucleic acids of the sample are RNAs, most notably mRNA of the sample. In a very specific embodiment, the nucleic acids are the product of amplification of RNA, most notably of mRNA, or cDNA prepared from RNA, most notably mRNA of the sample.

[0127] In a preferred embodiment, the biological sample is a sample of whole blood, i.e., not having undergone a separation step, which optionally can be diluted.

[0128] The invention is applicable to any mammal, preferably humans. The inventive method is particularly useful for the detection of Alzheimer's disease, most notably of the presence or the degree of severity or advance of Alzheimer's disease in a human being. Thus, the data provided in the examples show that the invention can detect the presence of Alzheimer's disease with sensitivity higher than 70% and specificity higher than 70%. Indeed, it is known that the rate of false positives in the current diagnosis of healthy patients on the basis of clinical examination is about 15% to 30% and the rate of false positives in the current diagnosis of AD patients is 15%, on the basis of multiple clinical examinations. A definitive diagnosis can only be established post-mortem from an autopsy of the brain.

[0129] A particular object of the present application relates to a method to detect the presence or the evolution of Alzheimer's disease in a human subject, comprising the combined determination of the presence (or absence or (relative) quantity), in a biological sample of the human subject, target molecules selected from:
[0130] a) nucleic acids comprising a sequence selected from SEQ ID NO.: 1 to 1754 or a distinctive fragment thereof having at least 15, preferably at least 16, 17, 18, 19, 20, 25 or 30 consecutive bases,
[0131] b) nucleic acids having a sequence complementary to a sequence according to a), and,
[0132] c) the polypeptides coded by the nucleic acids according to a) or b).

[0133] Preferably, the method comprises the combined determination of the presence, absence or quantity of 5, 10, 20, 30, 40, 50 or 60 or more target molecules such as defined above.

[0134] Another particular object of the present application relates to a method to detect the presence or the progress of Alzheimer's disease in a human subject, comprising contacting a biological sample from the subject that contains nucleic acids with a product comprising a support on which are immobilised nucleic acids comprising a sequence complementary and/or specific of one or, preferably, several target molecules selected from (i) the nucleic acids comprising a sequence selected from SEQ ID NO: 1 to 1754 or a fragment thereof having at least 15, preferably at least 16, 17, 18, 19, 20, 25 or 30 consecutive bases and (ii) nucleic acids having a sequence complementary to a sequence according to (i), to obtain an expression profile, the profile indicating the presence, degree of severity/advance or risk of developing Alzheimer's disease by said human subject. Preferably, the product includes distinct nucleic acids comprising a sequence complementary and/or specific of at least 5, 10, 20, 30, 40, 50, 60 or more distinct genes or RNAs as mentioned above.

[0135] Another object of the present application relates to a product comprising a support on which are immobilised nucleic acids comprising a sequence complementary and/or specific for one or, preferably, several target molecules selected from (i) nucleic acids comprising a sequence selected from SEQ ID NO: 1 to 1754 or a fragment thereof having at least 15, preferably at least 16, 17, 18, 19, 20, 25 or 30 consecutive bases and (ii) nucleic acids having a sequence complementary to a sequence according to (i). Preferably, the product includes distinct nucleic acids comprising a sequence complementary and/or specific of at least 5, 10, 20, 30, 40, 50, 60 or more genes or RNAs such as previously defined.

[0136] Another object of the present application relates to a product comprising a support on which is immobilised at least one, preferably several, nucleic acids comprising a sequence selected from SEQ ID NO: 1 to 1754, or a functional analogue thereof. Preferably, the product comprises at least 5, 10, 20, 30, 40, 50, 60 or more various nucleic acids selected from the nucleic acids mentioned above.

[0137] Another particular object of the invention relates to a product comprising a support on which is immobilised a set of probes, the set containing at least one probe comprising all or part of each of the following nucleic acid sequences, or of the complementary strand thereof: SEQ ID NOS.: 34, 230, 341, 454, 664, 811, 951, 1127, 1136 and 1752.

[0138] Another particular object of the invention relates to a product comprising a support on which is immobilised a set of probes, the set containing at least one probe comprising all or part of each of the following nucleic acid sequences, or of the complementary strand thereof: SEQ ID NOS.: 34, 35, 230, 316, 341, 454, 593, 664, 666, 811, 855, 951, 1127, 1136, 1330, 1498 and 1752.

[0139] A preferred inventive product comprises a support on which is immobilised at least one set of probes of distinct nucleic acids comprising a complementary and/or specific sequence of nucleic acids from the one of the panels 1 to 14 defined in table 1.

[0140] Typically, the probes are selected from SEQ ID: 1755-6532.

[0141] The invention further relates to a kit comprising a compartment or container comprising at least 5, 10, 20, 30, 40, 50, 60 or more various nucleic acids selected from the nucleic acids defined previously.

[0142] The invention also relates to a kit comprising a product such as defined previously and reagents for a hybridisation reaction.

[0143] The invention further relates to the use of a product or kit defined above for in vitro or ex vivo detection of the presence of Alzheimer's disease, or of the response to a treatment for Alzheimer's disease in a subject.

[0144] Another object of the present application relates to a product comprising a support on which is immobilised at least one ligand of a polypeptide coded by a nucleic acid target such as defined above, i.e., a nucleic acid comprising a sequence selected from SEQ ID NO: 1 to 1754, a distinctive fragment thereof having at least 15, preferably at least 16, 17, 18, 19, 20, 25 or 30 consecutive bases, a nucleic acid having a sequence complementary to same or a functional analogue thereof. Preferably, the product comprises at least 5, 10, 20, 30, 40, 50, 60 or more ligands of various polypeptides selected from polypeptides mentioned above.

[0145] The support can be any solid or semi-solid support having at least one surface, flat or not (i.e., in two or three dimensions), allowing the immobilisation of nucleic acids or polypeptides. Such supports are for example a slide, bead, membrane, filter, column, plate, etc. They can be made of any compatible material, such as most notably glass, silica, plastic, fibre, metal, polymer, polystyrene, Teflon, etc. The reagents can be immobilised on the surface of the support by known techniques, or, in the case of nucleic acids, synthesised directly in situ on the support. Immobilisation techniques include passive adsorption (Inouye et al., J. Clin. Microbiol. 28 (1990) 1469) and covalent bonding. Techniques are described for example in WO 90/03382 and WO 99/46403. The reagents immobilised on the support can be placed in a predetermined order, to facilitate detection and identification of the complexes formed, and according to a variable and adaptable density.

[0146] In one embodiment, the inventive product comprises a multiplicity of synthetic oligonucleotides, of length between 5 and 100 bases, and specific for one or more genes or RNAs such as previously defined.

[0147] The products of the invention typically comprise control molecules, which are used to calibrate and/or standardise the results.

[0148] Another object of the present application relates to a product comprising a support on which are immobilised nucleic acids comprising all or part of the sequences selected from SEQ ID NO: 1755-6532. These sequences represent specific probes of SEQ ID NO: 1 to 1754. Such a product will be able to advantageously incorporate nucleic acids chosen for their character of not discriminating the population of patients suffering from Alzheimer's disease, such nucleic acids being used as standardisation controls for the product. These nucleic acids can correspond to all or part of the sequences selected from SEQ ID NO: 1755-6532.

[0149] Another object of the present application relates to a kit comprising a compartment or container comprising at least one, preferably several, nucleic acids comprising a complementary and/or specific sequence of one or more genes or RNAs such as previously defined and/or one, preferably several ligands of one or more polypeptides such as previously defined. Preferably, the product comprises at least 5, 10, 20, 30, 40, 50, 60 or more various nucleic acids and/or ligands selected from the nucleic acids and ligands mentioned above. In a particular embodiment, the product comprises each of the nucleic acids of sequence SEQ ID NO: 1 to 1754 or a ligand for each of the polypeptide targets such as defined above. In another particular embodiment, the product comprises each of the nucleic acids of sequence SEQ ID NO: 1755-6532. The kit can further comprise reagents for a hybridisation or immunological reaction, as well as, if need be, controls and/or instructions.

[0150] Another object of the invention relates to the use of a product or kit such as defined above for the detection of Alzheimer's disease in a mammalian subject, preferably a human subject.

[0151] Another object of the invention relates to a nucleic acid of a sequence selected from SEQ ID NO: 1 to 1754, or a distinctive fragment thereof comprising at least 15 consecutive bases, preferably at least 16, 17, 18, 19, 20, 25 or 30 consecutive bases, or a nucleic acid having a sequence complementary to same, or a functional analogue thereof. The invention also relates to a cloning or expression vector comprising said nucleic acids, as well as any recombinant cell comprising one such vector or nucleic acid.

[0152] Another object of the invention relates to the use of a nucleic acid comprising a sequence selected from SEQ ID NO: 1 to 1754, or a distinctive fragment thereof comprising at least 15 consecutive bases, preferably at least 16, 17, 18, 19, 20, 25 or 30 consecutive bases, or a nucleic acid having a sequence complementary to same, or a functional analogue thereof, for the detection (primarily in vitro) of Alzheimer's disease in a mammalian subject.

[0153] According to a particular example of an embodiment of the invention, a blood sample is drawn from a mammal to be tested. The blood sample is optionally treated in such a way as to make the nucleic acids more accessible, and said nucleic acids are labelled. The nucleic acids are then applied to a product such as defined previously and the expression profile is determined, making it possible to diagnose the presence or absence of Alzheimer's disease in the subject. The inventive method is simple, performed ex vivo, and allows the early detection of Alzheimer's disease from a blood sample.

[0154] It is understood that any equivalent technique can be used within the scope of the present application to determine the presence of a target molecule.

[0155] Other aspects and advantages of the present invention will appear upon consideration of the following examples, which must be regarded as illustrative and non-restrictive.

### LEGEND TO THE FIGURE

[0156] FIG. 1. Configuration of the probes present on the GWSA microarray. A) The exon probes of type B, F and T and the junction probes of type C, D and E optimally cover the splicing events. B) Probes able to cover any single exon jump are also present with the same configuration. Similarly, exon-exon (X), exon-intron (Z) and intron-exon (Y) junction probes are also present.

### LEGEND TO THE TABLES

[0157] Table 1. Description of sequences SEQ ID NO: 1 to 6532.

[0158] Table 2. List of probe sets of each panel 1 to 14.

### Example 1

### Identification of Biomarkers for Alzheimer's Disease

[0159] 1.1. Characteristics of the Biological Samples

[0160] The examples presented below were initially performed with 177 or 100 among the 177 blood samples (2.5 ml of whole blood, taken in two PaxGene tubes). These samples cover 90 patients diagnosed with probable Alzheimer's disease according to DSM-IV criteria. These patients had a mean age of 78.08 years (standard deviation: 6.67 years). These patients presented a MMSE (Mini-Mental State Examination) score below 27 (average score of 17.16; standard deviation of 6.04). In addition 87 subjects, of comparable age to the AD patients, declared not demented after a clinical examination were also recruited (mean age 69.71 years, standard deviation 6.53 years; mean MMSE of 29.31 with a standard deviation of 0.97).

[0161] 1.2. Extraction of Total RNA from the Blood Sample

[0162] The blood samples were collected directly in PAXGene™ Blood RNA tubes (PreAnalytix, Hombrechtikon, CH). After the step of drawing the blood sample and in order to obtain complete cell lysis, the tubes were left at room temperature for 4 hours and then stored at −20° C. or −80° C. until extraction of the biological material. More precisely, in this protocol, total RNA was extracted using PAXGene Blood RNA® kits (PreAnalytix) by following the manufacturer's recommendations. Briefly, the tubes were centrifuged (10 min, 3,000 g) in order to obtain a pellet of nucleic acids. This pellet was washed and taken up in a buffer containing proteinase K necessary for protein digestion (10 min at 55° C.). An additional centrifugation (3 min, 14,000 g) was performed to eliminate cellular debris and ethanol was added in order to optimise conditions for binding nucleic acids. Total RNA was specifically bound on PAXgene RNA spin columns and, before they were eluted, contaminating DNA was digested using an RNAse-free DNAse set (Qiagen, Hilden, Germany). The quality and quantity of total RNA extracted were evaluated by performing electrophoregrams using an Agilent 2100 Bioanalyser with an RNA 6000 NanoChip kit (Agilent Technologies, Santa Clara, Calif.). Only samples meeting quality standards were used for further analyses.

[0163] 1.3. Genome-Wide SpliceArray™ (GWSA)

[0164] The detection and quantification of the exhaustive expression of transcripts by microarray require the use of a specific configuration of probes. Any reference messenger RNA/splicing variant pair can be modelled as a long isoform/short iso form (FIG. 1A). Thus, a splicing variant associated with an exon jump will be the short isoform compared to the reference variant. A splicing variant comprising a new exon or retaining an intron will be the long isoform compared to the reference variant. Other alternative splicing events (use of 5′ or 3′ cryptic splice sites) can also be modelled in the same manner.

[0165] The set of probes necessary to measure the expression of splicing variants is also indicated in FIG. 1A. This set is composed of three traditional exon probes F, T and B, and three exon-exon or exon-intron C, D and E junction probes. Probes F and T measure the expression of both isoforms, probes B, C and D measure the expression of the long isoform and probe E measures the expression of the short form.

[0166] In order to design all these probes, it is necessary to identify the splicing events corresponding to human genes, then the “target” regions from which the probes will be designed. The target sequences corresponding to junction probes C, D and E are defined by a length of 30 nucleotides, 15 nucleotides on either side of the junction. It is thus possible to “cover” any junction by probes of 25 nucleotides, for example 11/14, 12/13 or 13/12 (the slash (/) representing the junction region).

[0167] The GWSA chip is a microarray capable of providing thoroughly complete coverage of the expression of the human genome by taking into account the existence of splicing variants. 20,649 human genes were selected and then analysed to identify known splicing events and associated potentials. More than 90% of these genes could be associated with such events. Probes as described above were designed from the roughly 140,000 identified splicing events. In addition, the use of probes specific for splicing events corresponding to single exon jumps also makes it possible to predict the existence of such events (FIG. 1B). Moreover, the incorporation of junction probes covering each exon-exon, exon-intron and intron-exon region of each gene also makes it possible to characterise the splicing events that affect the 5′ and 3′ ends of exons (FIG. 1B). Three different probes were designed by target sequence and combined into a probe set. The expression values of individual probes were consolidated in a probe set value. At times, the probe set will contain only 2 or even 1 probe if the restrictions on the target sequence were too constraining GWSA is an individually designed microarray built on the Affymetrix GeneChip® platform with a resolution of 5 microns. The GWSA passed a quality control according to MAQC standards (Microarray Quality Control; Shi et al., Nat Biotechnol. 2006; 24 (9): 1151-61).

[0168] 1.4. RNA Amplification

[0169] 50 ng of total RNA was used as matrix for target synthesis using the WT-Ovation™ Pico RNA Amplification System kit (NuGen, San Carlos, Calif.). The FL-Ovation™ cDNA Biotin Module (NuGen, San Carlos, Calif.) was then used to carry out the fragmentation of 5 μg of cDNA amplified as well as biotin labelling. The various steps were performed by following the manufacturer's instructions. Each amplification/fragmentation/marking series contained equal numbers of samples from AD patients and controls.

[0170] The quality and the quantity of complementary DNA extracted were evaluated by performing electrophoregrams using Agilent's 2100 Bioanalyser and a NanoChip RNA 6000 kit (Agilent Technologies, Santa Clara, Calif.).

[0171] 1.5. Hybridisation on GWSA Chips

[0172] 5 μg of cDNA amplified and marked with biotin are used by hybridisation. The standard methods recommended by Affymetrix (Affymetrix, Santa Clara, Calif.) were applied for hybridisation of the targets to the GWSA microarray. The DNA chips were then washed and specific hybridisation revealed by following Affymetrix's recommendations. Hybridisation signals were detected using the GeneChip® 3000 7G scanner.

[0173] 1.6. Data Retrieval and Standardisation

[0174] .CEL files obtained after scanning the chips were then imported into Partek Genomic Suites™ (Partek Incorporated, St. Louis, Mich.) for, an adjustment of background signal as a function of the composition in GC of the oligonucleotide probes, correction of background signal by RMA, a quantile normalization of the arrays, and consolidation of expression values measured for each oligonucleotide in the probe set (1 455 607 PS).

[0175] The data were then filtered with respect to the expression values of the probe sets, the threshold expression level was set at 6.2 (log 2 scale) while being based on the distribution frequency of the expression value on the complete set of probes (361 299 PS) and with respect to variance, the threshold was set at 0.3 (299 577 PS).

### Example 2

### Selection of Signatures

[0176] A training group of discriminating signatures were used for supervised clustering analyses using binary classification algorithms and 5- or 10-fold cross validations (Partek Genomic Suites™). Nonparametric tests (1-way ANOVA) were performed for the analysis of the expression values obtained by the probe set and were used as a filtering tool for the selection of variables that integrated in the signature. Optimal classification models by training group were then applied to the test group for the identification of the performance of the signature, namely specificity (% proper classification of control patients) and sensitivity (% proper classification of AD patients).

[0177] The models were tested and the performance of each model was evaluated on all of the training groups. Fourteen signatures with the highest performance averages were selected to discriminate between the patients suffering from Alzheimer's disease and the non-demented control patients. The list of the markers composing these panels 1-14 is given in table 2. The performance of these panels in the first studies are summarised in the table below:

| Models-panel | AD % | CT % | Performance | PPV | NPV |
|---|---|---|---|---|---|
| AD vs CT-1-240v | 76.90% | 79.60% | 78.30% | 78.43% | 78.18% |
| AD vs CT-2-220v | 73.10% | 79.60% | 76.42% | 77.55% | 75.44% |
| AD vs CT-3-1460v | 75.00% | 77.80% | 76.42% | 76.47% | 76.36% |
| AD vs CT-4-140v | 73.10% | 77.80% | 75.47% | 76.00% | 75.00% |
| AD vs CT-5-160v | 73.10% | 75.90% | 74.53% | 74.51% | 74.55% |
| AD vs CT-6-80v | 73.10% | 75.90% | 74.53% | 74.51% | 74.55% |
| AD vs CT-7-120v | 71.20% | 75.90% | 73.58% | 74.00% | 73.21% |
| AD vs CT-8-240v | 80.80% | 77.80% | 79.25% | 77.80% | 80.80% |
| AD vs CT-9-300v | 78.80% | 77.80% | 78.30% | 77.37% | 79.21% |
| AD vs CT-10-170v | 76.90% | 79.60% | 78.30% | 78.40% | 78.16% |
| AD vs CT-11-130v | 76.90% | 75.90% | 76.42% | 75.45% | 77.33% |
| AD vs CT-12-150v | 76.90% | 74.10% | 75.47% | 74.09% | 76.91% |
| AD vs CT-13-120v | 75.00% | 75.90% | 75.47% | 74.98% | 75.92% |
| AD vs CT-14-250v | 75.00% | 75.90% | 75.47% | 74.98% | 75.92% |

### Example 3

### Demonstration of an Expression Profile to Discriminate Control Patients from Patients Suffering from Alzheimer's Disease (AD) from Blood Samples

[0178] Expression of the entire human transcriptome, representing approximately 21,000 genes, was analysed and compared between AD and Non Demented Control (NDT) patients using a GWSA microarray. All of the analyses mentioned in example 2 revealed a set of 1754 relevant target sequences (see table 1, SEQ ID NOS.: 1-1754).

[0179] The inventors then studied the simultaneous expression of probe sets associated with subsets of these 1754 sequences to obtain specific expression profiles for Alzheimer's disease.

[0180] The performance of these signatures was evaluated on a test set (validation set) of individuals not having taken part in the definition of this signature and recruited in a blind study. Performance values are described in example 2.

[0181] Signature analysis on the level of gene revealed that 10 genes are common to all of the 14 panels. The list of corresponding genes is given below (panel 15).

| Enter ID | Symbol | Description |
|---|---|---|
| 10308 | ZNF267 | zinc finger protein 267 |
| 1462 | CSPG2 | chondroitin sulfate proteoglycan 2 (versican) |
| 22832 | KIAA1009 | kiaa1009 |
| 2591 | GALNT3 | udp-n-acetyl-alpha-d-galactosamine |
| 3717 | JAK2 | Janus kinase 2 (a protein tyrosine kinase) |
| 51086 | TNNI3K | tnni3 interacting kinase |
| 54851 | ANKRD49 | ankyrin repeat domain 49 |
| 597 | BCL2A1 | bcl2-related protein a1 |
| 6093 | ROCK1 | rho-associated, coiled-coil containing protein |
| | | kinase 1 |
| 9976 | CLEC2B | c-type lectin domain family 2, member b |

[0182] A preferred example of all probes for detecting Alzheimer's disease thus comprises:
[0183] from 1 to 3 probes, overlapping or not, each comprising all or part of sequence SEQ ID NO: 34 or of a sequence complementary thereto;
[0184] from 1 to 3 probes, overlapping or not, each comprising all or part of sequence SEQ ID NO: 230 or of a sequence complementary thereto;
[0185] from 1 to 3 probes, overlapping or not, each comprising all or part of sequence SEQ ID NO: 341 or of a sequence complementary thereto;
[0186] from 1 to 3 probes, overlapping or not, each comprising all or part of sequence SEQ ID NO: 454 or of a sequence complementary thereto;
[0187] from 1 to 3 probes, overlapping or not, each comprising all or part of sequence SEQ ID NO: 664 or of a sequence complementary thereto;
[0188] from 1 to 3 probes, overlapping or not, each comprising all or part of sequence SEQ ID NO: 811 or of a sequence complementary thereto;
[0189] from 1 to 3 probes, overlapping or not, each comprising all or part of sequence SEQ ID NO: 951 or of a sequence complementary thereto;
[0190] from 1 to 3 probes, overlapping or not, each comprising all or part of sequence SEQ ID NO: 1127 or of a sequence complementary thereto;
[0191] from 1 to 3 probes, overlapping or not, each comprising all or part of sequence SEQ ID NO: 1136 or of a sequence complementary thereto; and
[0192] from 1 to 3 probes, overlapping or not, each comprising all or part of sequence SEQ ID NO: 1752 or of a sequence complementary thereto.

### Example 4

### Demonstrating an Expression Profile to Discriminate Control Patients from Patients Suffering from Alzheimer's Disease (AD) from Blood Samples

[0193] Analysis of signatures on the gene level made it possible to select 17 markers common to the 5 panels presenting the best performance. The list of these 17 markers (which includes the 10 markers of example 3), is given below (panel 16).

| 17 PS ADvsC | SEQ ID |
|---|---|
| 10308.001.2-T | 34 |
| 10308.006.1-F | 35 |
| 1462.002.1-B | 230 |
| 2123.001.1-T | 316 |
| 22832.016.1-B | 341 |
| 2591.003.1-T | 454 |
| 3146.000.2-X | 593 |
| 3717.000.10-X | 664 |
| 3717.000.23-X | 666 |
| 51086.001.1-B | 811 |
| 51426.010.1-B | 855 |
| 54851.003.1-F | 951 |
| 597.000.1-Z | 1127 |
| 6093.031.1-B | 1136 |
| 6672.027.1-T | 1330 |
| 830.000.5-Z | 1498 |
| 9976.003.1-F | 1752 |

[0194] Another preferred example of all probes to detect Alzheimer's disease thus comprises:
[0195] from 1 to 3 probes, overlapping or not, each comprising all or part of sequence SEQ ID NO: 34 or of a sequence complementary thereto;
[0196] from 1 to 3 probes, overlapping or not, each comprising all or part of sequence SEQ ID NO: 35 or of a sequence complementary thereto;
[0197] from 1 to 3 probes, overlapping or not, each comprising all or part of sequence SEQ ID NO: 230 or of a sequence complementary thereto;
[0198] from 1 to 3 probes, overlapping or not, each comprising all or part of sequence SEQ ID NO: 316 or of a sequence complementary thereto;
[0199] from 1 to 3 probes, overlapping or not, each comprising all or part of sequence SEQ ID NO: 341 or of a sequence complementary thereto;
[0200] from 1 to 3 probes, overlapping or not, each comprising all or part of sequence SEQ ID NO: 454 or of a sequence complementary thereto;
[0201] from 1 to 3 probes, overlapping or not, each comprising all or part of sequence SEQ ID NO: 593 or of a sequence complementary thereto;
[0202] from 1 to 3 probes, overlapping or not, each comprising all or part of sequence SEQ ID NO: 664 or of a sequence complementary thereto;
[0203] from 1 to 3 probes, overlapping or not, each comprising all or part of sequence SEQ ID NO: 666 or of a sequence complementary thereto;
[0204] from 1 to 3 probes, overlapping or not, each comprising all or part of sequence SEQ ID NO: 811 or of a sequence complementary thereto;
[0205] from 1 to 3 probes, overlapping or not, each comprising all or part of sequence SEQ ID NO: 855 or of a sequence complementary thereto;
[0206] from 1 to 3 probes, overlapping or not, each comprising all or part of sequence SEQ ID NO: 951 or of a sequence complementary thereto;
[0207] from 1 to 3 probes, overlapping or not, each comprising all or part of sequence SEQ ID NO: 1127 or of a sequence complementary thereto;
[0208] from 1 to 3 probes, overlapping or not, each comprising all or part of sequence SEQ ID NO: 1136 or of a sequence complementary thereto;
[0209] from 1 to 3 probes, overlapping or not, each comprising all or part of sequence SEQ ID NO: 1330 or of a sequence complementary thereto;
[0210] from 1 to 3 probes, overlapping or not, each comprising all or part of sequence SEQ ID NO: 1498 or of a sequence complementary thereto; and
[0211] from 1 to 3 probes, overlapping or not, each comprising all or part of sequence SEQ ID NO: 1752 or of a sequence complementary thereto.

### Example 5

### Detection Protocol

[0212] The steps of the diagnostic test are as follows:

[0213] RNA is first extracted from blood samples collected in Paxgene tubes. These tubes contain a strong denaturing additive that stabilises the nucleic acids in vivo by reducing the breakdown of RNA in vitro and by minimising gene induction. When used with the Paxgene™ Blood RNA Kit, the samples taken enable exact detection and quantification of the level of gene transcription. After extraction, the quality of sample is assessed and the RNA is quantified, by procedures that are well known in the art.

[0214] The RNA is reverse transcribed, linearly amplified and then fragmented, labelled with biotin and finally hybridised on biochips containing the inventive probes. The chips are then washed, hybridisation is revealed and then they are scanned to measure the level of hybridisation on each probe. The hybridisation results are imported and analysed using Partek statistical analysis software.

[0215] Application of the signature gives a binary response that makes it possible to place the patient tested in the AD category or in the control category.

The application's sequence listing, which the Patent Office published only in electronic form, follows.

SEQUENCE LISTING (6532 sequences)

SEQ ID NO: 1 - DNA, 224 bp, Homo sapiens
acggaatactccttataaaaccctggaacctgttaaacccccaacagttcctaatgactatatgaccagtcctgctaggcttggaagtcagcatagtccaggcaggacagcatctttaaatcagagaccaaggacacacagtggaagtagtggaggaagtggaagtcgagaaaacagtggtagcagtagtattggcattcccattgctgtgcctacaccttcgc

SEQ ID NO: 2 - DNA, 500 bp, Homo sapiens
gaatatggagcgccctgtaaggtatattcggaaacctatcgattacacagttctggatgatgtgggccatggtgtcaagtggctaaaagccaagcatggaaataaccagcctgcaagaactggcacactgtcgagaacaaatcctcctactcagaaaccgccaagtcctcccatgtcaggccggggaacactgggacggaatactccttataaaaccctggaacctgttaaacccccaacagttcctaatgactatatgaccagtcctgctaggcttggaagtcagcatagtccaggcaggacagcatctttaaatcagagaccaaggacacacagtggaagtagtggaggaagtggaagtcgagaaaacagtggtagcagtagtattggcattcccattgctgtgcctacaccttcgccacccactattggaccagaaaacatttctgtccctcctccttctggagctccaccagcaccacctctggcaccacttctcc

SEQ ID NO: 3 - DNA, 396 bp, Homo sapiens
atactgagcctttacctcctgattctggtgacaagaaccttgtaatacagaaatcaaaagatgaagcccaagataatggggctactataatgcctattataacagagtctttttcattatctgccgaagattatgaaatgaaaaagatcattgttaccgattctgatgatgatgatgatgatgtcattttttgctccgagattctgcccacaaaggagactttgccgagtaataacacagtggcacaggtccaatctaacccaggccctgttgctatttcagatgttgcacctagtgctagcaataactcgccccctttaacaaatatcacacctactcagaaacttcctactcctgtgaatcaggcaactttgagccaaacacaaggaagtgaaa

SEQ ID NO: 4 - DNA, 36 bp, Homo sapiens
aggttaaaagcatctcaggtacagcgcaggatggta

SEQ ID NO: 5 - DNA, 84 bp, Homo sapiens
ggaatggataaaaacattggcgagcaactcaataaagcgtatgaagccttccggcaggcatgcatggatagagattctgcagta

SEQ ID NO: 6 - DNA, 500 bp, Homo sapiens
tttctgggatctgaaagaagaatttcataaaatatgcatgctagcaaaagcacagaaagaccacttaagcaaacttaatataccagacactgcaactgaaacacagtgctctgtgcctatacagtgtacggataaaacagataaacaagaagcgctgtttaagcctcaggctaaagatgatataaatagaggtgcaccatccatcacatctgtcacaccaagaggactgtgcagagatgaggaagacacctcttttgaatcactttctaaattcaatgtcaagtttccacctatggacaatgactcaactttcttacatagcactccagagagacccggcatccttagtcctgccacgtctgaggcagtgtgccaagagaaatttaatatggagttcagagacaacccagggaactttgttaaaacagaagaaactttatttgaaattcagggaattgaccccatagcttcagctatacaaaaccttaaaacaactgaca

SEQ ID NO: 7 - DNA, 36 bp, Homo sapiens
aatgtggcagaaaagacgctacaatgagctactgtt

SEQ ID NO: 8 - DNA, 36 bp, Homo sapiens
ttttcttaatcatttcagtgttcgaccacctaagaa

SEQ ID NO: 9 - DNA, 174 bp, Homo sapiens
gggccaaatggcagtggcaaatccaatgttattgattctatgctttttgtgtttggctatcgagcacaaaaaataagatctaaaaaactctcagtattaatacataattctgatgaacacaaggacattcagagttgtacagtagaagttcattttcaaaagataattgataag

SEQ ID NO: 10 - DNA, 66 bp, Homo sapiens
aacgagcagcacttctgaaatccatgttgaatttcctcaagaaggccatccaagaccctgctttct

SEQ ID NO: 11 - DNA, 500 bp, Homo sapiens
cagctggaagtatggatgcttctacccagggcttattagaaggcattgggctagatggtgacacattggctcccatggagacagatgaacctactgcttcagactctaagggcaaatctaaaatcacaccagcaatggctgccagaattaagcaaatcaagcctttgttatcagcttcctccagattaggccgagcacttgctgagctatttggacttcttgttaaactttgtgtgggatctcctgtccgccagagaaggagccatcatgctgccagcaccactacagcaccgacacctgccgcgcgatcaacagcctcagctctcactaagctcttgactaaggggttatcttggcagcccccaccatatacacctactccccgattcaggctgacattcttcatctgttcagttggtttcacatccccaatgctgtttgatgagaggaagtatccctaccacctcatgctgcaaaaatttctctgctccggaggccac

SEQ ID NO: 12 - DNA, 156 bp, Homo sapiens
cagctggaagtatggatgcttctacccagggcttattagaaggcattgggctagatggtgacacattggctcccatggagacagatgaacctactgcttcagactctaagggcaaatctaaaatcacaccagcaatggctgccagaattaagcaaa

SEQ ID NO: 13 - DNA, 500 bp, Homo sapiens
tgtgaagttcgtgacctcaaacccaatggggccaacatcttggtaacagaggagaataagaaggagtatgtacacctggtatgccagatgagaatgacaggagccatccgcaagcagttggcggctttcttagaaggcttctatgagatcattccaaagcgcctcatttccatcttcactgagcaggagttagagctgcttatatcaggactgcccaccattgacatcgatgatctgaaatccaacactgaataccacaagtaccagtccaactctattcagatccagtggttctggagagcattgcgttctttcgatcaagctgaccgtgccaagttcctccagtttgtcacgggtacttccaaggtacccctgcaaggctttgctgccctcgaaggcatgaatggcattcagaagtttcagatccatcgagatgacaggtccacagatcgcctgccttcagctcacacatgttttaatcagctggatctgcctgccta

SEQ ID NO: 14 - DNA, 500 bp, Homo sapiens
tcgattgtatatagtatttgaaggagaagaagggcaggatgctggcgggctcctgcgggagtggtatatgatcatctctcgagagatgtttaaccctatgtatgccttgttccgtacctcacctggtgatcgagtcacctacaccatcaatccatcttcccactgcaaccccaaccacctcagctacttcaagtttgtcggacgcattgtggccaaagctgtatatgacaaccgtcttctggagtgctactttactcgatccttttacaaacacatcttgggcaagtcagtcagatatacagatatggagagtgaagattaccacttctaccaaggtctggtttatctgctggaaaatgatgtctccacactaggctatgacctcaccttcagcactgaggtccaagagtttggagtttgtgaagttcgtgacctcaaacccaatggggccaacatcttggtaacagaggagaataagaaggagtatgtacacctggtat

SEQ ID NO: 15 - DNA, 500 bp, Homo sapiens
gctacttcaagtttgtcggacgcattgtggccaaagctgtatatgacaaccgtcttctggagtgctactttactcgatccttttacaaacacatcttgggcaagtcagtcagatatacagatatggagagtgaagattaccacttctaccaaggtctggtttatctgctggaaaatgatgtctccacactaggctatgacctcaccttcagcactgaggtccaagagtttggagtttgtgaagttcgtgacctcaaacccaatggggccaacatcttggtaacagaggagaataagaaggagtatgtacacctggtatgccagatgagaatgacaggagccatccgcaagcagttggcggctttcttagaaggcttctatgagatcattccaaagcgcctcatttccatcttcactgagcaggagttagagctgcttatatcaggactgcccaccattgacatcgatgatctgaaatccaacactgaataccacaagtac

SEQ ID NO: 16 - DNA, 36 bp, Homo sapiens
tgtttctttgtttttcaggagcgctatagttatgtc

SEQ ID NO: 17 - DNA, 36 bp, Homo sapiens
gaaagctccgaacaggtccaacctacatgcccaaag

SEQ ID NO: 18 - DNA, 500 bp, Homo sapiens
gggcttcacactgaacgatgctgccaacagccgcctcatcataacgcaagttaggcgggattatttgaaagaggctgtgacaacactgaaaacagtattggatcagcagcagaccccttctaggttagcagtgacccgtgtcatccaggcattggccatgaagggtgatgttgaaaacatagaagtagttcagaagatgttaaatggactcgaagactccattggactttcaaaaatggttttcatcaataacattgctttggctcaaataaagaataataacatagatgccgcaatagaaaacattgaaaatatgcttacttcagagaataaagtcattgaaccccaatacttcggcttggcatacttattcagaaaagtaatagaggagcagttggaaccagcagttgaaaagataagcatcatggcggagagattggccaatcagtttgcaatttataaacctgtcactgattttttccttcaacttgtggatgcag

SEQ ID NO: 19 - DNA, 26 bp, Homo sapiens
caaagcaatgaagcgacctctcgaag

SEQ ID NO: 20 - DNA, 500 bp, Homo sapiens
gtacaggccccagaacgaagacgagctggagctgcgcgagggggacagggtggatgtcatgcagcagtgtgacgatggctggtttgtgggtgtctcccggaggacccagaaattcggaacgttccctggaaattacgttgccccggtgtgagtggtctccatggcaacttggagccagccaggatggggtggggagcggtggcactcgtgggagggagaggacccccgcccacatcctccttccccaggacctgagctcccagcatctgcagacgacccccgcagcatttccctcggacccccctcgaagccccctggactgattcccacccacgactcacaggcattcctcccacagccctttcatttcctccccaccccactccccaaatacagaggtctgctttgaagcggagaccatttccaggccttattgagaccagaccccaagtcccccacccccatcctgctccagcgtttcctctaacagggaccagctc

SEQ ID NO: 21 - DNA, 500 bp, Homo sapiens
atcttcttcgccatttggcacattatagcatttgatgagctgaagactgattacaagaatcctatagaccagtgtaataccctgaatccccttgtactcccagagtacctcatccacgctttcttctgtgtcatgtttctttgtgcagcagagtggcttacactgggtctcaatatgcccctcttggcatatcatatttggaggtatatgagtagaccagtgatgagtggcccaggactctatgaccctacaaccatcatgaatgcagatattctagcatattgtcagaaggaaggatggtgcaaattagctttttatcttctagcatttttttactacctatatggcatgatctatgttttggtgagctcttagaacaacacacagaagaattggtccagttaagtgcatgcaaaaagccaccaaatgaagggattctatccagcaagatcctgtccaagagtagcctgtggaatctgatcagttactttaaaaaatga

SEQ ID NO: 22 - DNA, 52 bp, Homo sapiens
aagatgtcagtttgtcatatccccaacatcatgttggaaattcaagccctac

SEQ ID NO: 23 - DNA, 500 bp, Homo sapiens
cgctgggctaagagtttgaataagcagaaagaaaactttaaaaatagctttcagcctgtcaattccttgagggaagaagaaaggagagaatctgctgcagcagacgctggctttgctctctttgagaagaagggagccttagctgaaaggcagcagctcatcccagaattggtgcgaaatggagatgaggagaatcccctcaaaaggggtctggttgctgcttacagtggtgacagtgacaatgaggaggagctggtggagagacttgagagtgaggaagagaagctagctgactggaagaagatggcctgtctgctctgccggcgccagttcccgaacaaagatgccctagtcaggcaccagcaactctcagaccttcacaagcaaaacatggacatctaccgacgatccaggctgagcgagcaggagctggaagccttggagctaagggagagagagatgaaataccgagaccgagctgcagaaagacgggagaagta

SEQ ID NO: 24 - DNA, 112 bp, Homo sapiens
tagaaaacttatgtcacttgattgtggacctcctgttctttaccctgtgctcttctgcttcactcatggaagaaagctgtaaattctcactgcctttacttcaaggatttct

SEQ ID NO: 25 - DNA, 500 bp, Homo sapiens
aaggaatttaaaatggacaacttttcacctaaagctggcactagcaaattgcaacagacagtaccagctgatgcatctcctgattctaagtgtcctatatgcttggatagatttgataatgtgtcttacttagatcgctgcttacataagttctgttttcgctgtgtacaggagtggtcaaaaaacaaagctgaatgcccactatgtaaacagccctttgattctattttccattctgtgagggcagaagatgacttcaaggagtatgtcctaaggccttcgtataatggttcttttgtcacccctgatcgacgatttcgctaccgtacaactctgacaagggaacgaaatgcttctgtgtattcacctagtggtcctgtgaacagaagaacaacaactccaccggatagtggagtactgtttgaagggttaggcatttcaacaagacctagagatgttgaaattcctcagtttatgagacagattgcagtaaggaggcc

SEQ ID NO: 26 - DNA, 116 bp, Homo sapiens
tgttgcactagaatggtgacagggaagaaaaagtatcaagaaactacagataatagtctctgtgactgaggatttgaaggcaaaagagccatttttacatagagccctgagagaat

SEQ ID NO: 27 - DNA, 177 bp, Homo sapiens
ggacaactccaattccctgcaggtgaaaacgtgccacctggtcaggtactggatctccgccttcccagcggagtttgacttgaacccggagttggctgagcagatcaaggagctgaaggctctgctagaccaagaagggaaccgacggcacagcagcctaatcgacatagacagcgt

SEQ ID NO: 28 - DNA, 36 bp, Homo sapiens
aaccagctggaagtgaaggcctgaaccaaaatggaa

SEQ ID NO: 29 - DNA, 500 bp, Homo sapiens
aaaagaaaaggagaaggagaagacccgaccacgatctcggtcacgctccaaatcaagatcccggacgcggtcccgctctccttctcacactcgacctagacggcgccatagatcccgatcaagatcgtattcacctagaaggcggccaagcccaagaaggcggccatctcctcgaagaagaactccgccaagaagaatgcctcctccaccaaggcatagaaggagtagatctccagtaagacgaagaagacgttcgtcagcatccttgtctgggagtagctcatcatcctcttcatctcgttcacggtcaccaccaaagaagcctcccaagaggacatccagcccccctcggaaaactcgtaggttatctccttcagcaagtcctccaaggcgaaggcacaggccatcacctcctgcaactccaccacccaaaactcggcattcccctacaccccagcagtcaaaccgtacaagaaaaagtcgtgtttctgtgtctccag

SEQ ID NO: 30 - DNA, 500 bp, Homo sapiens
acagtctgtaagaagggtctcatcctcccgatctgtctccgggtctcctgagccagcagctaaaaagcccccagcacctccatcccccgtccagtctcagtcaccgtctacaaactggtcaccagctgtaccggtcaaaaaggccaaaagcccaacaccgagcccatcaccgccaagaaattcagatcaggaaggaggtggaaagaaaaagaagaaaaagaaggacaagaaacacaaaaaggataagaagcacaagaagcacaaaaaacacaagaaggaaaaggctgtggctgcagctgctgcagctgctgtgacccctgcagccattgcagctgccacaaccacattagcacaggaagagccagtggcagcgccagagccgaagaaggagactgaaagtgaagctgaagataaccttgatgatttagaaaagcacctgcgtgaaaaggccctgagatcaatgaggaaggcccaagtgtccccacagtcttagggggaaa

SEQ ID NO: 31 - DNA, 500 bp, Homo sapiens
ctccaccaccaaagcggcgggtctcccattctccacctcccaaacaaagaagctccccagtcaccaagagacgttcaccttcattatcatccaagcataggaaagggtcttccccaagccgctctacccgggaggcccgatcaccacaaccaaacaaacggcattcgccctcaccacggcctcgagctcctcagacctcctcaagtcctccacccgttcgaagaggagcgtcgtcatcaccccaaagaaggcagtccccgtctccaagtactaggcccattaggagagtctccaggactccggaacctaaaaagataaaaaaggctgcttccccaagcccacagtctgtaagaagggtctcatcctcccgatctgtctccgggtctcctgagccagcagctaaaaagcccccagcacctccatcccccgtccagtctcagtcaccgtctacaaactggtcaccagctgtaccggtcaaaaaggccaaaagcccaacaccg

SEQ ID NO: 32 - DNA, 36 bp, Homo sapiens
cctccagcaggttctcagactgtctcagctgctgcc

SEQ ID NO: 33 - DNA, 98 bp, Homo sapiens
agctgtccaaaagtgtagtgcttgtcgaggtcgaggtgtgcgcatcatgatcagacagctggctccagggatggtacaacagatgcagtctgtgtgct

SEQ ID NO: 34 - DNA, 500 bp, Homo sapiens
ccttcagctataggtcatacctcactacacatcggagaagtcatagtggagagagaccctacaaatgtgaagaatgtggcaaagcctttaactctaggtcatacctcattgcacatcagagaagtcatactagagaaaaactttaaaaatgtaaaacatggagcagattttttacttgttacccatgtcttattgtgcatcagataatttatatgggagtgaaaccctacaaatgttaagaatgtggcataacctttaactattttcaagccttacacaatagcagagaatataaactgaaaaaatccatacaaatattaaaaatgtggcaaattattttaaactgtgctcaacccttactcaagataatccatactagagaaacactatagatgtaaaaatgtgaaaagttttattcaaaatatcaaacttatgagtcacctaggggttcatagaaaaaggaagtttgcagatgcaataaatgtgaggaagtatttaat

SEQ ID NO: 35 - DNA, 354 bp, Homo sapiens
caacatcagatcattcctaccgaagagaaaccctataaatggaaagaatgtggcaaggtctttaaccttaactgtagtttataccttactaaacagcagcaaattgatactggagaaaacctttacaaatgtaaagcatgtagcaaatcttttactcgttcctccaatcttattgtgcatcagagaattcacactggagagaaaccatacaaatgtaaagaatgtggcaaagcctttcgctgtagttcataccttactaaacataagcgaattcatactggagagaaaccttataaatgtaaagaatgtggaaaagcttttaaccgtagttcatgccttactcaacatcagaca

SEQ ID NO: 36 - DNA, 263 bp, Homo sapiens
tgtagcaaatcttttagtgactcctcaggtcttactgtgcatcggcgaactcatactggagagaaaccctatacatgtaaagaatgtggcaaagcctttagttatagttcagatgttattcagcatcggagaattcatactggccagagaccctacaaatgtgaagaatgtggcaaagccttcaactataggtcatacctcactacacatcagagaagtcatactggagagagaccctacaaatgtgaagaatgtggcaaagc

SEQ ID NO: 37 - DNA, 125 bp, Homo sapiens
aaacatctaaaaactttgaagaattggtcagtgactctgagctgcatcaagatcagcctgatattcttggaaggagtccagctagtgaggcagcatgttcaaaagtacccgatacgaatgtctcc

SEQ ID NO: 38 - DNA, 36 bp, Homo sapiens
ctgagccaaagaccccaggtgggagtgacatatcca

SEQ ID NO: 39 - DNA, 636 bp, Homo sapiens
atgggcaaaggagatcctaagaagccgagaggcaaaatgtcatcatatgcattttttgtgcaaacttgtcgggaggagcataagaagaagcactcagatgcttcagtcaacttctcagagttttctaacaagtgctcagagaggtggaagaccatgtctgctaaagagaaaggaaaatttgaggatatggcaaaggcggacaagacccattatgaaagacaaatgaaaacctatatccctcccaaaggggagacaaaaaagaagttcaaggatcccaatgcacccaagaggcctccttcggccttcttcctgttctgctctgagtatcacccaaaaatcaaaggagaacatcctggcctgtccattggtgatgttgcgaagaaactgggagagatgtggaataacactgctgcagatgacaagcagcctggtgaaaagaaggctgcgaagctgaaggaaaaatacgaaaaggatattgctgcatatcaagctaaaggaaagcctgaggcagcaaaaaagggagttgtcaaagctgaaaaaagcaagaaaaagaaggaagaggaggaagatgaggaagatgaagaggatgaggaggaggaagatgaagaagatgaagaagatgatgatgatgaataa

SEQ ID NO: 40 - DNA, 500 bp, Homo sapiens
tactggtcttttgtggaaggggcccatgcagaatctccaccatgtgtagacaacctaaaaagtgacatcggtgataaagggaagaataaagatgaaggggatgtttgtaaccatgagaaaaagactgcagatcttgcccctcacccagaagagaaaaagaagaaacgttctggattcagagacagaaaagtgatggaatatgagaataggattcgagcctactccacgccagacaaaatcttccgatattttgccaccttgaaagtcatcagtgagcctggtgaagcagaagtgtttatgacaccagaagattttgtgcgatccataacacccaatgaaaaacaaccagaacacttgggtctggatcaatatataataaaacgctttgatggaaagacagagaaaatttcccaggaacgagaaaaatttgctgatgaaggcagtatattttacacccttggagaatgtgggctcatatccttttcagattacattttcct

SEQ ID NO: 41 - DNA, 93 bp, Homo sapiens
atccacaatgtttcagccattttggtttctgttggaagatgtggcaaaaatatcagtgtattggggcaagctggacttctaacgatgataaaa

SEQ ID NO: 42 - DNA, 500 bp, Homo sapiens
tgttgtacaactcagtaaggaaaaagttcagaaaaaaagctacagaaaactgaagactacctttgttaatgttacttctgaatgcccagtgaatgatgtttacaattttaatttgaatggagctgatgaccctatcataaaacttggaatccaagagtttcaagctacagctaaagaagcttgtgcggataggtcaattagattggtaggtccaaggaatcatgatgaacttaaatcttctgtcaaaacaaaagataaaaaaattataacaaatcatcaaaagaaaaatctgtttagtgatactgaaacagagtacagatgtgatgacagcaagactgatattagctggctaagagaaccgaaatcaaaaccacagctaatagactatagcagaaataaaaatgtgaagaatcataaaagtggaaaatcaagatcatccttggaaaagggacagccaagctctaaaatgacacccagtaaaaatatcacaaaaaagatgg

SEQ ID NO: 43 - DNA, 500 bp, Homo sapiens
taatttgaatggagctgatgaccctatcataaaacttggaatccaagagtttcaagctacagctaaagaagcttgtgcggataggtcaattagattggtaggtccaaggaatcatgatgaacttaaatcttctgtcaaaacaaaagataaaaaaattataacaaatcatcaaaagaaaaatctgtttagtgatactgaaacagagtacagatgtgatgacagcaagactgatattagctggctaagagaaccgaaatcaaaaccacagctaatagactatagcagaaataaaaatgtgaagaatcataaaagtggaaaatcaagatcatccttggaaaagggacagccaagctctaaaatgacacccagtaaaaatatcacaaaaaagatggacaagacaattccggaaggaagaatcagacttccacgaaaagcaaccaaaacaaaaaaaaactataaagatctctcaaattcagaatcagagtgtgaacaagaatttt

SEQ ID NO: 44 - DNA, 500 bp, Homo sapiens
ctgatgaccctatcataaaacttggaatccaagagtttcaagctacagctaaagaagcttgtgcggataggtcaattagattggtaggtccaaggaatcatgatgaacttaaatcttctgtcaaaacaaaagataaaaaaattataacaaatcatcaaaagaaaaatctgtttagtgatactgaaacagagtacagatgtgatgacagcaagactgatattagctggctaagagaaccgaaatcaaaaccacagctaatagactatagcagaaataaaaatgtgaagaatcataaaagtggaaaatcaagatcatccttggaaaagggacagccaagctctaaaatgacacccagtaaaaatatcacaaaaaagatggacaagacaattccggaaggaagaatcagacttccacgaaaagcaaccaaaacaaaaaaaaactataaagatctctcaaattcagaatcagagtgtgaacaagaattttcacattcatttaaa

SEQ ID NO: 45 - DNA, 36 bp, Homo sapiens
ttatactgggacgtgtaggtggcagtaggggagata

SEQ ID NO: 46 - DNA, 500 bp, Homo sapiens
ctctactctcagttcagaagagctgctaattcattttttctctttattgcactgctgcagcaaatacctgatgtgtcaccaacaggtcgttatacaacactggttcctctcttatttattttagctgtggcagctatcaaagagataatagaagatattaaacgacataaagctgataatgcagtgaacaagaaacaaacgcaagttttgagaaatggtgcttgggaaattgtccactgggaaaaggtggcagtaggggagatagtgaaagtgaccaatggggaacatctcccagcagatctcatcagtctgtcctcaagtgagccccaagccatgtgctacattgaaacatccaacttagatggtgaaacaaacttgaaaattagacagggcttaccagcaacatcagatatcaaagacgttgacagtttgatgaggatttctggcagaattgagtgtgaaagtccaaacagacatctctacgattttgttggaaacat

SEQ ID NO: 47 - DNA, 500 bp, Homo sapiens
cagatatcaaagacgttgacagtttgatgaggatttctggcagaattgagtgtgaaagtccaaacagacatctctacgattttgttggaaacataaggcttgatggacatggcaccgttccactgggagcagatcagattcttcttcgaggagctcagttgagaaatacacagtgggttcatggaatagttgtctacactggacatgacaccaagctgatgcagaattcaacaagtccaccacttaagctctcaaatgtggaacggattacaaatgtacaaattttgattttattttgtatcttaattgccatgtctcttgtctgttctgtgggctcagccatttggaatcgaaggcattctggaaaagactggtatctcaatctaaactatggtggcgctagtaattttggactgaatttcttgaccttcatcatccttttcaacaatctcattcctatcagcttattggttacattagaagttgtgaaatttacccag

SEQ ID NO: 48 - DNA, 81 bp, Homo sapiens
ttttctgtgtgcggctgattttagaaagattgcttccttgtatggtagcgataagtttgatttgccctatgggatgagaac

SEQ ID NO: 49 - DNA, 60 bp, Homo sapiens
gaaacggagaaataagatccagccttgtttatcaaagccagcttttgcctctctgctgag

SEQ ID NO: 50 - DNA, 86 bp, Homo sapiens
ttttctgtgtgcggctgattttagaaagattgcttccttgtatggtagcgataagtttgatttgccctatgggatgagaacatcag

SEQ ID NO: 51 - DNA, 36 bp, Homo sapiens
ctcctggttatggtacagatacaaactggactctca

SEQ ID NO: 52 - DNA, 26 bp, Homo sapiens
tgctatatatttggcaaggcatgttg

SEQ ID NO: 53 - DNA, 500 bp, Homo sapiens
gcatatcttcttatttgatttggcagtgatcgtatgtaagagaaaaggtgataactatgaaatgaaggaaataatagatcttcagcagtacaagatagccaataatcctacaaccgataaagaaaacaaaaagtggtcttatggcttctacctcatccatacccaaggacaaaatgggttagaattttattgcaaaacaaaagatttaaagaagaaatggctagaacagtttgaaatggctttgtctaacataagaccagactatgcagactccaatttccacgacttcaagatgcataccttcactcgagtcacatcctgcaaagtctgccagatgctcctgaggggaacattttatcaaggctatttatgttttaagtgtggagcgagagcacacaaagaatgtttgggaagagtagacaattgtggcagagttaattctggtgaacaagggacactcaaactaccagagaaacggaccaatggactgcgaagaactc

SEQ ID NO: 54 - DNA, 500 bp, Homo sapiens
tttggcagtgatcgtatgtaagagaaaaggtgataactatgaaatgaaggaaataatagatcttcagcagtacaagatagccaataatcctacaaccgataaagaaaacaaaaagtggtcttatggcttctacctcatccatacccaaggacaaaatgggttagaattttattgcaaaacaaaagatttaaagaagaaatggctagaacagtttgaaatggctttgtctaacataagaccagactatgcagactccaatttccacgacttcaagatgcataccttcactcgagtcacatcctgcaaagtctgccagatgctcctgaggggaacattttatcaaggctatttatgttttaagtgtggagcgagagcacacaaagaatgtttgggaagagtagacaattgtggcagagttaattctggtgaacaagggacactcaaactaccagagaaacggaccaatggactgcgaagaactcctaaacaggtggatccag

SEQ ID NO: 55 - DNA, 65 bp, Homo sapiens
ctatttatgttttaagtgtggagcgagagcacacaaagaatgtttgggaagagtagacaattgtg

SEQ ID NO: 56 - DNA, 400 bp, Homo sapiens
aaacttaatgatgcacttcaccagaagcagctactaacattgagattagacaaccaattggcttttcaacagaaagatgccagcaaatatcaagaattaatgaaacaagaaatggaaaccattttgttgagacagaaacaactagaagagacaaatcttcagctaagagaaaaagctggagatgttcgtcgaaacctgcgtgactttgagttgacagaagagcaatatattaaattaaaagcttttcctgaagatcagctttctattcctgaatatgtatctgttcgcttctatgagctagtgaatccattaagaaaggaaatctgtgaactacaagtgaaaaagaatatcctagcagaagaattaagtacaaacaaaaaccaactgaagcagctgacag

SEQ ID NO: 57 - DNA, 65 bp, Homo sapiens
aaacttaatgatgcacttcaccagaagcagctactaacattgagattagacaaccaattggcttt

SEQ ID NO: 58 - DNA, 500 bp, Homo sapiens
gaaatcccttgttgagggcctgcaaccttgtgcttccgactggagacgcctttggtccctcggtgtctgcactggctgctggtcaaggcttcagtgtggagtaattgacactttcgagaatattaaaatcaaattagagaagaaaactgatccataataataaaaatgtctcgaaaaatttcaaaggagtcaaaaaaagtgaacatctctagttctctggaatctgaagatattagtttagaaacaacagttcctacggatgatatttcctcatcagaagagcgagagggcaaagtcagaatcaccaggcagctaattgaacgaaaagaactacttcataatattcagttactaaaaattgagctatcccagaaaactatgatgatcgacaatttgaaagtggattatcttacaaagattgaagaattggaggagaaacttaatgatgcacttcaccagaagcagctactaacattgagattagacaaccaattggcttt

SEQ ID NO: 59 - DNA, 500 bp, Homo sapiens
tgaacatctctagttctctggaatctgaagatattagtttagaaacaacagttcctacggatgatatttcctcatcagaagagcgagagggcaaagtcagaatcaccaggcagctaattgaacgaaaagaactacttcataatattcagttactaaaaattgagctatcccagaaaactatgatgatcgacaatttgaaagtggattatcttacaaagattgaagaattggaggagaaacttaatgatgcacttcaccagaagcagctactaacattgagattagacaaccaattggcttttcaacagaaagatgccagcaaatatcaagaattaatgaaacaagaaatggaaaccattttgttgagacagaaacaactagaagagacaaatcttcagctaagagaaaaagctggagatgttcgtcgaaacctgcgtgactttgagttgacagaagagcaatatattaaattaaaagcttttcctgaagatcagctttct

SEQ ID NO: 60 - DNA, 500 bp, Homo sapiens
aacgaaaagaactacttcataatattcagttactaaaaattgagctatcccagaaaactatgatgatcgacaatttgaaagtggattatcttacaaagattgaagaattggaggagaaacttaatgatgcacttcaccagaagcagctactaacattgagattagacaaccaattggcttttcaacagaaagatgccagcaaatatcaagaattaatgaaacaagaaatggaaaccattttgttgagacagaaacaactagaagagacaaatcttcagctaagagaaaaagctggagatgttcgtcgaaacctgcgtgactttgagttgacagaagagcaatatattaaattaaaagcttttcctgaagatcagctttctattcctgaatatgtatctgttcgcttctatgagctagtgaatccattaagaaaggaaatctgtgaactacaagtgaaaaagaatatcctagcagaagaattaagtacaaacaaaaaccaa

SEQ ID NO: 61 - DNA, 63 bp, Homo sapiens
ggataatgctgtggctgaaaaggaacgagcagtgatggctgaaaaggatgctttagaaaaaca

SEQ ID NO: 62 - DNA, 500 bp, Homo sapiens
ctataaatgcaagtgcagatggcaacattggaactatagaggatggtagtgacagtgaaaatattcaagcaaatggaattccaggaacaccaatttctgttgcatatacaccatccttacctgatgatagattgtcagtctcttccaatgatactcaggaatctggaaattcttcaggaccttcacctggtgctaagttttcccacattttacaaaaggatgcctttctagtattcaggtcattgtgtaaactgtcaatgaaaccactgtcagatggaccaccagatccaaagtctcatgaactacgatccaagattctttcattgcagttacttctatccattctgcagaatgcaggacctattttcaggacaaatgagatgtttattaatgctattaagcagtatctttgtgttgcactctcaaaaaatggagtctcatctgttccagaggtttttgagctttctctttctatatttcttactttgttgtcaaatttc

SEQ ID NO: 63 - DNA, 140 bp, Homo sapiens
ctataaatgcaagtgcagatggcaacattggaactatagaggatggtagtgacagtgaaaatattcaagcaaatggaattccaggaacaccaatttctgttgcatatacaccatccttacctgatgatagattgtcagtc

SEQ ID NO: 64 - DNA, 500 bp, Homo sapiens
caagtgcagatggcaacattggaactatagaggatggtagtgacagtgaaaatattcaagcaaatggaattccaggaacaccaatttctgttgcatatacaccatccttacctgatgatagattgtcagtctcttccaatgatactcaggaatctggaaattcttcaggaccttcacctggtgctaagttttcccacattttacaaaaggatgcctttctagtattcaggtcattgtgtaaactgtcaatgaaaccactgtcagatggaccaccagatccaaagtctcatgaactacgatccaagattctttcattgcagttacttctatccattctgcagaatgcaggacctattttcaggacaaatgagatgtttattaatgctattaagcagtatctttgtgttgcactctcaaaaaatggagtctcatctgttccagaggtttttgagctttctctttctatatttcttactttgttgtcaaatttcaagacacat

SEQ ID NO: 65 - DNA, 36 bp, Homo sapiens
aagaaagactgctttgagagacctaggcgagttgga

SEQ ID NO: 66 - DNA, 45 bp, Homo sapiens
taccgcaaaggagcatgtgaaaattgtggggccatgacacacaaa

SEQ ID NO: 67 - DNA, 500 bp, Homo sapiens
ttggatgcccctccagctgaattgcttttagcccagactgaagactatgtggagtactcaagacatgggacagtcatcaaaggacaggagcgggctgttgcctgctctaagtatgaggaggatgtgaagatccacaatcacacacatatctggggatcgtactggaaagaaggccgatggggatacaaatgctgtcactcttttttcaagtattcctattgtactggagaagctgggaaggagattgttaactctgaggagtgtattataaatgagataactggggaagaatctgtgaaaaaacctcaaaccctcatggagctgcatcaagaaaaactgaaagaggaaaagaagaagaagaaaaagaaaaagaagaagcatcgaaagagcagttcagatagtgatgatgaagaaaagaagcatgaaaaattgaaaaaggcactgaacgcagaggaggcccgccttcttcatgtcaaggagaccatgcagattgatgagag

SEQ ID NO: 68 - DNA, 126 bp, Homo sapiens
ttggatgcccctccagctgaattgcttttagcccagactgaagactatgtggagtactcaagacatgggacagtcatcaaaggacaggagcgggctgttgcctgctctaagtatgaggaggatgtg

SEQ ID NO: 69 - DNA, 500 bp, Homo sapiens
acccaaaggcatggacaaaattcttctaagcagtggacgagatgcctctcttatggtaaccaatgatggtgccactattctaaaaaacattggtgttgacaatccagcagctaaagttttagttgatatgtcaagggttcaagatgatgaagttggtgatggcactacctctgttaccgttttagcagcagaattattaagggaagcagaatctttaattgcaaaaaagattcatccacagaccatcatagcgggttggagagaagccacgaaggctgcaagagaggcgctgttgagttctgcagttgatcatggttccgatgaagttaaattccgtcaagatttaatgaatattgcgggcacaacattatcctcaaaacttcttactcatcacaaagaccactttacaaagttagctgtagaagcagttctcagactgaaaggctctggcaacctggaggcaattcatattatcaagaagctaggaggaagtttggcag

SEQ ID NO: 70 - DNA, 36 bp, Homo sapiens
tcgagacatcaacctacaggatgaagactggaatga

SEQ ID NO: 71 - DNA, 25 bp, Homo sapiens
tgctctcaatgggccatgtgctcat

SEQ ID NO: 72 - DNA, 36 bp, Homo sapiens
agaggagcaggtggtcaggtaaggccagggcagtgg

SEQ ID NO: 73 - DNA, 414 bp, Homo sapiens
tagccccagtggaccaggctatcatatcatgttgcctttcattactacgttcagatctgtgcagacaacactacaaactgatgaagttaaaaatgtgccttgtggaacaagtggtggggtcatgatctatattgaccgaatagaagtggttaatatgttggctccttatgcagtgtttgatatcgtgaggaactatactgcagattatgacaagaccttaatcttcaataaaatccaccatgagctgaaccagttctgcagtgcccacacacttcaggaagtttacattgaattgtttgatcaaatagatgaaaacctgaagcaagctctgcagaaagacttaaacctcatggccccaggtctcactatacaggctgtgcgtgttacaaaacccaaaatcccagaagccataag

SEQ ID NO: 74 - DNA, 32 bp, Homo sapiens
gaaaggaggcaatttgaaaccaaagagaataa

SEQ ID NO: 75 - DNA, 500 bp, Homo sapiens
tactattcctgctctctttacacttacccacagggaacttggcagaaggtgatacaggtggttcagtcagatagttttgaggcagctgtgccatcaaatagccacattgtttcggaacctggaaagaatgtcacactcacttgtcagcctcagatgacgtggcctgtgcaggcagtgaggtgggaaaagatccagccccgtcagatcgacctcttaacttactgcaacttggtccatggcagaaatttcacctccaagttcccaagacaaatagtgagcaactgcagccacggaaggtggagcgtcatcgtcatccccgatgtcacagtctcagactcggggctttaccgctgctacttgcaggccagcgcaggagaaaacgaaaccttcgtgatgagattgactgtagccgagggtaaaaccgataaccaatataccctctttgtggctggagggacagttttattgttgttgtttgttatctcaattaccaccatcat

SEQ ID NO: 76 - DNA, 36 bp, Homo sapiens
gaggagatgtaactatcggacctcggacagtgatcc

SEQ ID NO: 77 - DNA, 263 bp, Homo sapiens
caaccctgccaggctctccaatcgcatgtggaattatcgctctacccaggcggtggtgtcgatctacgttccaattggggccgtaccatggcggagaagactcaaaagagtgtgaagattgctcctggagcagttgtatgtgtagaaagtgaaatcagaggagatgtaactatcggacctcggacagtgatccaccctaaagcaagaattattgcggaagccgggccaatagtgattggcgaagggaacctaatagaagaaca

SEQ ID NO: 78 - DNA, 25 bp, Homo sapiens
aaccctgctcggccagaagtcactc

SEQ ID NO: 79 - DNA, 42 bp, Homo sapiens
cgagagagaacagaactgaagcctgatttctttgatccagct

SEQ ID NO: 80 - DNA, 36 bp, Homo sapiens
gagatgtggattttgaaggagtcagacaaaaagctg

SEQ ID NO: 81 - DNA, 500 bp, Homo sapiens
cagcagatatgatcaaggaaggagcagcagtcattgatgtgggaataaatagagttcacgatcctgtaactgccaaacccaagttggttggagatgtggattttgaaggagtcagacaaaaagctgggtatatcactccagttcctggaggtgttggccccatgacagtggcaatgctaatgaagaataccattattgctgcaaaaaaggtgctgaggcttgaagagcgagaagtgctgaagtctaaagagcttggggtagccactaattaactactgtgtcttctgtgtcacaaacagcactccaggccagctcaagaagcaaagcaggccaatagaaatgcaatatttttaatttattctactgaaatggtttaaaatgatgccttgtatttattgaaagcttaaatgggtgggtgtttctgcacatacctctgcagtacctcaccagggagcattccagtatcatgcagggtcctgtgatctagccaggagcagcca

SEQ ID NO: 82 - DNA, 243 bp, Homo sapiens
atatattggctagcaaatgtgccctgctctctcccctcttaaaaatagcagcaacccatctttgcaaagaagcttgcctatagagcaggcactctgtgaatggactgtgcttttacgaccctacagggtatcaagatactgtgcagctcgccaacaaggattaattgcaaggactggtagatcgaatttactgaagacttggagcttgcttctgagaacaaacgcaaaaggacagtaaactgt

SEQ ID NO: 83 - DNA, 213 bp, Homo sapiens
ctcccctcttaaaaatagcagcaacccatctttgcaaagaagcttgcctatagagcaggcactctgtgaatggactgtgcttttacgaccctacagggtatcaagatactgtgcagctcgccaacaaggattaattgcaaggactggtagatcgaatttactgaagacttggagcttgcttctgagaacaaacgcaaaaggacagtaaactgt

SEQ ID NO: 84 - DNA, 36 bp, Homo sapiens
ttcctgggcaaggccaagggaccaggagcgaaccat

SEQ ID NO: 85 - DNA, 128 bp, Homo sapiens
agaacttacctaatggatatccccgatatccctcatttggagatgcttcatcccatccgtcaagcagacatccttctgtgggaagtgctcgcctgccttcagtaggggaagaatctacacatcctttg

SEQ ID NO: 86 - DNA, 500 bp, Homo sapiens
ctaccatagtagatgctttggataccctttatatcatgggacttcatgatgaattcctagatgggcaaagatggattgaagacaaccttgatttcagtgtgaattcagaggtgtctgtgtttgaagtcaacattcgatttattggaggcctacttgcagcatattacctatcaggagaggagatattcaagattaaagcagtgcaattggctgagaaactccttcctgcctttaacacacctactgggattccttgggcaatggtgaatttgaaaagtggagtagggcgaaactggggctgggcatctgcaggtagcagcattctggctgaatttggtacactacatatggagttcatccacctcagctacttgacaggggacctgacttactacaaaaaggttatgcacattcggaaactacttcagaaaatggatcgtccaaatggtctttatccaaattatttgaaccccagaacagggcgctggggtcagtatcat

SEQ ID NO: 87 - DNA, 36 bp, Homo sapiens
gctagagccgagcgaagcgatgcctaaatcaaagga

SEQ ID NO: 88 - DNA, 419 bp, Homo sapiens
acttgtttcttcaggctcttctggcagtgattctgacagtgaggttgacaaaaagttaaagaggaaaaagcaagttgctccagaaaaacctgtaaagaaacaaaagacaggtgagacttcgagagccctgtcatcttctaaacagagcagcagcagcagagatgataacatgtttcagattgggaaaatgaggtacgttagtgttcgcgattttaaaggcaaagtgctaattgatattagagaatattggatggatcctgaaggtgaaatgaaaccaggaagaaaaggtatttctttaaatccagaacaatggagccagctgaaggaacagatttctgacattgatgatgcagtaagaaaactgtaaaattcgagccatataaataaaacctgtactgttctagttgttttaatctgtc

SEQ ID NO: 89 - DNA, 26 bp, Homo sapiens
taaagaggaaaaagcaagttgctcca

SEQ ID NO: 90 - DNA, 193 bp, Homo sapiens
gactccgccgcgatggtgacccggttcctgggcccacgctaccgggagctggtcaagaactgggtcccgacggcctacacatggggcgctgtgggcgccgtggggctggtgtgggccaccgattggcggctgatcctggactgggtaccttacatcaatggcaagtttaagaaggataattaattacacaaac

SEQ ID NO: 91 - DNA, 100 bp, Homo sapiens
tggacaagaggaaacccacagctcagcttcaggcttcttatgtttctgaaaacagcttggatattttaatgcacgttgcattaaacctcactgaaacctg

SEQ ID NO: 92 - DNA, 298 bp, Homo sapiens
atggggcgctgtgggcgccgtggggctggtgtgggccaccgattggcggctgatcctggactgggtaccttacatcaatggcaagtttaagaaggataattaattacacaaacccttcacagactgctctggtgcctggtggtgctagctcctcccacctcagcacctgctgcatctggagcagcccaagcctcaggatggacaagaggaaacccacagctcagcttcaggcttcttatgtttctgaaaacagcttggatattttaatgcacgttgcattaaacctcactgaaacctg

SEQ ID NO: 93 - DNA, 79 bp, Homo sapiens
gagctgacctacactctggccacagaggaagcggaacgcattggtgtagaccacgtagcccgaatgacagcaacaggca

SEQ ID NO: 94 - DNA, 36 bp, Homo sapiens
atagaaaatgcaaaacaggttggccgccttgaaaat

SEQ ID NO: 95 - DNA, 36 bp, Homo sapiens
tggacatgtgccaataaggcttccaagaacaaaaca

SEQ ID NO: 96 - DNA, 36 bp, Homo sapiens
atggtgtatttcccaaaggacaagaatgcgaatacc

SEQ ID NO: 97 - DNA, 67 bp, Homo sapiens
ctccctcagttccaatatgtgacctgtatcctaatggtgtatttcccaaaggacaagaatgcgaata

SEQ ID NO: 98 - DNA, 500 bp, Homo sapiens
atggagcaactggaaagaagaagaaaaagaagaagaagaagagaggaccaaaagttcaaacagaccctccctcagttccaatatgtgacctgtatcctaatggtgtatttcccaaaggacaagaatgcgaatacccacccacacaagatgggcgaacagctgcttggagaactacaagtgaagaaaagaaagcattagatcaggcaagtgaagagatttggaatgattttcgagaagctgcagaagcacatcgacaagttagaaaatacgtaatgagctggatcaagcctgggatgacaatgatagaaatctgtgaaaagttggaagactgttcacgcaagttaataaaagagaatggattaaatgcaggcctggcatttcctactggatgttctctcaataattgtgctgcccattatactcccaatgccggtgacacaacagtattacagtatgatgacatctgtaaaatagactttggaacacatataagtggtagg

SEQ ID NO: 99 - DNA, 36 bp, Homo sapiens
ctggatggaaaggaatgagtgagtgttatgtatatt

SEQ ID NO: 100 - DNA, 36 bp, Homo sapiens
aagtactgagttgctcagacttgggacccagcacta

SEQ ID NO: 101 - DNA, 343 bp, Homo sapiens
ccacatcccgggagagagaacgcaggcgccgagaaaggtccaggtctcgggagagagatcggagaaggagccgctcgcgatccccgcaccgaagacgctcccgatctccaagacgacatagatccacatctccttccccttctcgactgaaagaaagaagagatgaggaaaagaaagaaacaaaagaaacaaagagcaaagaacggcagattactgaggaagacttagagggcaaaacagaggaagaaatagaaatgatgaagttaatgggatttgcctcctttgactccacaaaaggtaagaaggtggatggctctgtaaatgcctatgccataaatgtctc

SEQ ID NO: 102 - DNA, 500 bp, Homo sapiens
atatggaagaagaacttcctcttttctctggagacagtggcaagccagtacaggctactctgtcatctttgaagatgttagatgtgggaaagtggccaattttttccctttgttctgaagaagaactacagttaattcgtcaggcttgtgtctttggcagtgctggcaatgaagttttatacactacagtaaatgatgagatttttgtgcttggcacaaactgctgtggctgtttggggttaggtgacgtccagagcaccattgaacctcggagactggattctttaaatggcaaaaaaatagcctgcctcagctatgggagtggtccacatattgtccttgcaacaacagaaggagaagtctttacctggggtcataatgcttatagccagctgggcaatgggacaactaatcatggtttagtgccctgtcatatctctactaatctgtcaaacaaacaagtcattgaagttgcctgtgggtcttaccattctttggtg

SEQ ID NO: 103 - DNA, 204 bp, Homo sapiens
aaatgaatgaatgtacacacctcattgtgcaagaaccaaaaggtcagaagtatgagtgtgccaagagatggaatgtacactgtgtgaccacacagtggttttttgacagtattgagaaaggtttttgtcaggatgaatccatatacaagacagaacctagaccagaagcaaagactatgcccaattcttcaactcctaccagcc

SEQ ID NO: 104 - DNA, 500 bp, Homo sapiens
agtggcagaaagctagataaactgagaagacttattaacagtggaggtggagttcgttttaaccagctaaatgaagatgtaactcatgttattgtgggagattatgatgatgaattgaagcagttttggaataaatcagcccacaggcctcatgtagtgggagcaaagtggttgctagagtgtttcagtaaaggttatatgctttctgaagaaccatatatccatgctaattaccagccagtggaaattccagtttcacatcagcctgaaagtaaagcagctcttttaaaaaagaagaacagcagcttctctaagaaagactttgctcctagtgaaaagcatgagcaagctgatgaagatctgctctctcaatatgaaaatggtagctccacagtagttgaggctaagacgtctgaagccaggccctttaatgattctactcatgctgagcccttgaatgattctactcacatttctttgcaagaagaaaaccagtcttc

SEQ ID NO: 105 - DNA, 500 bp, Homo sapiens
tcagcaatatttccaacataaatgcaagttgcgtaagtgaatcaatatgtaattcacttaacagcaaactggagcctacacttgaaaatctagaaaatctggatgtcagtgcatttcaagcacctgaagatttattagatggttgtcggatatatctttgcggttttagtggcagaaagctagataaactgagaagacttattaacagtggaggtggagttcgttttaaccagctaaatgaagatgtaactcatgttattgtgggagattatgatgatgaattgaagcagttttggaataaatcagcccacaggcctcatgtagtgggagcaaagtggttgctagagtgtttcagtaaaggttatatgctttctgaagaaccatatatccatgctaattaccagccagtggaaattccagtttcacatcagcctgaaagtaaagcagctcttttaaaaaagaagaacagcagcttctctaagaaagactttgctcctagt

SEQ ID NO: 106 - DNA, 500 bp, Homo sapiens
atgtaattcacttaacagcaaactggagcctacacttgaaaatctagaaaatctggatgtcagtgcatttcaagcacctgaagatttattagatggttgtcggatatatctttgcggttttagtggcagaaagctagataaactgagaagacttattaacagtggaggtggagttcgttttaaccagctaaatgaagatgtaactcatgttattgtgggagattatgatgatgaattgaagcagttttggaataaatcagcccacaggcctcatgtagtgggagcaaagtggttgctagagtgtttcagtaaaggttatatgctttctgaagaaccatatatccatgctaattaccagccagtggaaattccagtttcacatcagcctgaaagtaaagcagctcttttaaaaaagaagaacagcagcttctctaagaaagactttgctcctagtgaaaagcatgagcaagctgatgaagatctgctctctcaatatgaaa

SEQ ID NO: 107 - DNA, 36 bp, Homo sapiens
cttcagccagtttgtcagacccctcattgctgccaa

SEQ ID NO: 108 - DNA, 500 bp, Homo sapiens
ggggcttccttcccctccatagggccaggcatttttttctggattcaaacaggcaacaatgaccttttattttctgtttgtccccacctccccagccttccacctcctgttcttcctaccttcttcctttttgactaaataatccccacctcccttgatcatacagtgaggctacagtgactgaggggagaatcccctcctgttcactctcccaaccctgctccagcccctcagcttcccagaccctcatgcagttggttgtaaattctcccaggagctgttttactgtctacttttcaggattaaaaaaaaaatcaaaacttaaaaaaaaaaaagtttaaaaagcaaaatggggagggggaggaagcagtgacttttttttggtaattatgcgcttttttttaatttttagaatttgtctttttactgtgggtgggctgttgatatttcatcaagataagcatttctttcctgagttcaggtgactgaggaagagccac

SEQ ID NO: 109 - DNA, 117 bp, Homo sapiens
catgttaatgcaaccctggacctgatcgaaggcagcatgactgtttgtactacaaagaagacttttgatccatatatcatcattagggccagagatctgataaaactgttagcaagg

SEQ ID NO: 110 - DNA, 373 bp, Homo sapiens
ttatatgttcagtgtgcaataaaaagtgttcttcagcatcaagcctacaggaacatagaaagattcatgagatatttgattgtcaagaatgtatgaagaaatttatttcagctaatcagctaaaacgtcatatgatcacccactcagaaaaacgaccctataattgcgagatttgtaataagtctttcaagaggcttgatcaagtgggtgctcacaaagtaatacacagcgaagacaaaccttacaaatgcaaactttgtggaaagggatttgcccacagaaatgtttacaagaatcataagaagacccactctgaggagagaccgttccaatgtgaagaatgtaaagctttgttccggaccccattttcttt

SEQ ID NO: 111 - DNA, 500 bp, Homo sapiens
ttatatgttcagtgtgcaataaaaagtgttcttcagcatcaagcctacaggaacatagaaagattcatgagatatttgattgtcaagaatgtatgaagaaatttatttcagctaatcagctaaaacgtcatatgatcacccactcagaaaaacgaccctataattgcgagatttgtaataagtctttcaagaggcttgatcaagtgggtgctcacaaagtaatacacagcgaagacaaaccttacaaatgcaaactttgtggaaagggatttgcccacagaaatgtttacaagaatcataagaagacccactctgaggagagaccgttccaatgtgaagaatgtaaagctttgttccggaccccattttctttacagagacacctgctaatacataacagtgagaggactttcaagtgccatcactgcgatgctacctttaagaggaaggatacattaaatgttcatgtccaggtggttcatgaaagacacaagaagtat

SEQ ID NO: 112 - DNA, 500 bp, Homo sapiens
tgtcaagaatgtatgaagaaatttatttcagctaatcagctaaaacgtcatatgatcacccactcagaaaaacgaccctataattgcgagatttgtaataagtctttcaagaggcttgatcaagtgggtgctcacaaagtaatacacagcgaagacaaaccttacaaatgcaaactttgtggaaagggatttgcccacagaaatgtttacaagaatcataagaagacccactctgaggagagaccgttccaatgtgaagaatgtaaagctttgttccggaccccattttctttacagagacacctgctaatacataacagtgagaggactttcaagtgccatcactgcgatgctacctttaagaggaaggatacattaaatgttcatgtccaggtggttcatgaaagacacaagaagtataggtgtgagctatgtaataaggcctttgttacaccttcagtgcttagaagtcataagaaaacacatacaggagaaaagga

SEQ ID NO: 113 - DNA, 500 bp, Homo sapiens
gcgagatttgtaataagtctttcaagaggcttgatcaagtgggtgctcacaaagtaatacacagcgaagacaaaccttacaaatgcaaactttgtggaaagggatttgcccacagaaatgtttacaagaatcataagaagacccactctgaggagagaccgttccaatgtgaagaatgtaaagctttgttccggaccccattttctttacagagacacctgctaatacataacagtgagaggactttcaagtgccatcactgcgatgctacctttaagaggaaggatacattaaatgttcatgtccaggtggttcatgaaagacacaagaagtataggtgtgagctatgtaataaggcctttgttacaccttcagtgcttagaagtcataagaaaacacatacaggagaaaaggagaaaatctgtccatattgtggccagaaatttgccagcagtggtacactcagagttcatatccggagccacacaggtgagcgtccc

SEQ ID NO: 114 - DNA, 122 bp, Homo sapiens
gcgagatttgtaataagtctttcaagaggcttgatcaagtgggtgctcacaaagtaatacacagcgaagacaaaccttacaaatgcaaactttgtggaaagggatttgcccacagaaatgtt

SEQ ID NO: 115 - DNA, 500 bp, Homo sapiens
aaagcagtctaaaggagtcttcgcgaagttttcagtgctctgtttgcaattcttccttcagttcagcatcgagttttgagcagcaccaggagacttgccggggggatgccaggtttgtgtgcaaggctgacagctgtggaaagaggctgaagagcaaggatgccctgaaaagacaccaggaaaatgtccacactggagatcctaagaaaaagcttatatgttcagtgtgcaataaaaagtgttcttcagcatcaagcctacaggaacatagaaagattcatgagatatttgattgtcaagaatgtatgaagaaatttatttcagctaatcagctaaaacgtcatatgatcacccactcagaaaaacgaccctataattgcgagatttgtaataagtctttcaagaggcttgatcaagtgggtgctcacaaagtaatacacagcgaagacaaaccttacaaatgcaaactttgtggaaagggatttgcccacagaaatgtt

SEQ ID NO: 116 - DNA, 500 bp, Homo sapiens
gcctacaggaacatagaaagattcatgagatatttgattgtcaagaatgtatgaagaaatttatttcagctaatcagctaaaacgtcatatgatcacccactcagaaaaacgaccctataattgcgagatttgtaataagtctttcaagaggcttgatcaagtgggtgctcacaaagtaatacacagcgaagacaaaccttacaaatgcaaactttgtggaaagggatttgcccacagaaatgtttacaagaatcataagaagacccactctgaggagagaccgttccaatgtgaagaatgtaaagctttgttccggaccccattttctttacagagacacctgctaatacataacagtgagaggactttcaagtgccatcactgcgatgctacctttaagaggaaggatacattaaatgttcatgtccaggtggttcatgaaagacacaagaagtataggtgtgagctatgtaataaggcctttgttacaccttcagtg

SEQ ID NO: 117 - DNA, 440 bp, Homo sapiens
agatgttgatgcctaagaagaaccggattgccatttatgaactcctttttaaggagggagtcatggtggccaagaaggatgtccacatgcctaagcacccggagctggcagacaagaatgtgcccaaccttcatgtcatgaaggccatgcagtctctcaagtcccgaggctacgtgaaggaacagtttgcctggagacatttctactggtaccttaccaatgagggtatccagtatctccgtgattaccttcatctgcccccggagattgtgcctgccaccctacgccgtagccgtccagagactggcaggcctcggcctaaaggtctggagggtgagcgacctgcgagactcacaagaggggaagctgacagagatacctacagacggagtgctgtgccacctggtgccgacaagaaagccgaggctggggctgggtca

SEQ ID NO: 118 - DNA, 500 bp, Homo sapiens
tcaactgtgtaacaagagagcctcttactgctgatgaggaagaagcattaaaacaggaacaccaacgaaaagagaaagagctcttagaaaaaatccaaagtgccatagcctgtaccaatatctttcccttgggtcgcgaccgcatgtatagacgatactggattttcccttctattcctggactctttattgaagaggattattctggtcttactgaagacatgctgttgcctagaccttcatcatttcagaataatgtacagtctcaagatcctcaggtatccactaaaactggagagcctttgatgtctgaatctacctccaacattgaccaaggtccacgtgaccattctgtgcagctgccaaaaccagtgcataagccaaatcggtggtgcttttacagttcttgtgaacagctagaccagcttattgaagctcttaattctagaggacatagagaaagtgccttaaaagaaactttgttacaagagaaaagcaga

SEQ ID NO: 119 - DNA, 500 bp, Homo sapiens
caggaagaccgtgatgggagctgcagcacagtcgggggtgtaggttatggggacagtaaggattgtatcctggagccgctttccctgccagaaagtccaggtggcaccaccactttagaaggttctccatctgtgccttgtattttctgtgaagaacattttcctgtggctgaacaagacaaacttctgaagcacatgattattgagcataagattgtcatagctgatgtcaagttggttgctgatttccaaaggtacattttatattggaggaaaaggttcactgaacagcccatcacagatttttgtagtgtaataagaattaattccactgctccatttgaagaacaagagaattattttttgttatgtgacgttttaccagaagatagaattcttagagaagagcttcagaaacagagactgagagaaattctggaacaacagcagcaagaacgaaatgataccaattttcatggcgtttgtatgttttgcaatga

SEQ ID NO: 120 - DNA, 500 bp, Homo sapiens
ttcagaaacagagactgagagaaattctggaacaacagcagcaagaacgaaatgataccaattttcatggcgtttgtatgttttgcaatgaagaattccttggaaacagatctgttattttgaaccacatggccagagaacatgctttcaacattggattgccagacaacattgtaaactgcaatgaatttttgtgtacattacagaaaaagcttgacaatttgcagtgcttgtactgtgagaagaccttcagggacaaaaatacacttaaagatcacatgaggaaaaaacagcatcgtaagattaatcctaagaacagagaatatgacagattttatgtcatcaattatttggaacttggaaaatcgtgggaagaagttcagttggaagatgatcgggagttgctggaccatcaggaagatgactggtctgattgggaagaacaccctgcctctgcagtctgcttattttgtgaaaagcaagcagaaacaattgagaag

SEQ ID NO: 121 - DNA, 37 bp, Homo sapiens
acagccaaagaaattctgtgattactgcaagtgctgg

SEQ ID NO: 122 - DNA, 357 bp, Homo sapiens
tcggagggaggttcgggtgggcatcgggcggctggaagagctcgactcgtcccgctgggaaagcgcgagtctgagtggaaccctggacgacttgcagagcggctggcgcagtcatggcggactactggaagtcacagccaaagaaattctgtgattactgcaagtgctggatagcagacaataggcctagtgttgaatttcatgaaagaggaaagaatcataaggaaaatgtggcaaaaaggatcagtgagattaaacagaaaagcctggataaggcaaaggaagaagaaaaggcatcaaaggagtttgctgcaatggaggcagctgccctgaaagcataccaagaggatttgaaaa

SEQ ID NO: 123 - DNA, 128 bp, Homo sapiens
gatggaggaagtgacccagaaacacagaaagaaaaaagtattcagaaacagaattcattaggttcaaatgaagaaaaatcgaaaactcttaagaaatcaaacccatatggagaatggcaagaaattaa

SEQ ID NO: 124 - DNA, 101 bp, Homo sapiens
aagatggcggatactctcccttcggagtttgatgtgatcgtaatagggacgggtttgcctgaatccatcattgcagctgcatgttcaagaagtggccggag

SEQ ID NO: 125 - DNA, 36 bp, Homo sapiens
ctcaggaaattctacaagggcaagaagtacaagccc

SEQ ID NO: 126 - DNA, 71 bp, Homo sapiens
ctttccagaagacattccaaccaccatggtagagtcacagtaatgtcatggagaatgaagggagtcgggga

SEQ ID NO: 127 - DNA, 36 bp, Homo sapiens
gccaccagcctctccttgaataactgggagatgaaa

SEQ ID NO: 128 - DNA, 149 bp, Homo sapiens
cttagtcgtgtgtacatcattgggaatggagggaaataaatgactggatggtcgctgctttttaagtttcaaattgacattccagacaagcggtgcctgagcccgtgcctgtcttcagatcttcacagcacagttcctgggaaggtgga

SEQ ID NO: 129 - DNA, 86 bp, Homo sapiens
aagtttcaaattgacattccagacaagcggtgcctgagcccgtgcctgtcttcagatcttcacagcacagttcctgggaaggtgga

SEQ ID NO: 130 - DNA, 230 bp, Homo sapiens
acactcagggagtacaccatgtgaagactggacttaaacagctacaccaccagaagccgagagagaggctggaacatagccttccctttggagccctagcagatgctaatccagcgtgcgtcctgacagaggttgaagggggcttctcaagtcccaggtccagcttggtgtggttcagctactcaagagacatctgctgctaatggatgagcagtcaacctggacgcagg

SEQ ID NO: 131 - DNA, 147 bp, Homo sapiens
agaggtctgcggcattccagtgcaaaagttcggagcaggacggcttacctgttttctagatttgtcaaatctctcaataagcaaatgaatcctttcattgaggatattttgaatagaatacaagatttattagagctttctccacct

SEQ ID NO: 132 - DNA, 114 bp, Homo sapiens
ttggtcaagaatagcagtgcttgcaaagattacctcattgaagcaatgaagtaccatttgctgccaacagagcagcgtatattaatgaagagtgtccggacccggctgaggaca

SEQ ID NO: 133 - DNA, 36 bp, Homo sapiens
gagaggaagacgtccaagatgatgaagaacgagagc

SEQ ID NO: 134 - DNA, 123 bp, Homo sapiens
ttagcttgtttcatcatcacccaagccaatgagtcatttataacaatcacaagtctggaaatctgcattgtcgttttttttattctaatatatgtgctaacccttcaccacttgctgacctat

SEQ ID NO: 135 - DNA, 500 bp, Homo sapiens
agtcctcagctcttactcgacataagatgactcatactggagagaaaccctacaaatgtgaagagtgtggaaaagcttttaaccggtcttcacaccttactcaacataaggtaattcatactagagagaaaccctacaaatgtgaagagtgtggcaaagcctttaaccggtcttcacacattactcaacataagagaattcataatagagagaagcccttcaaatatgatgaatgttgcaaagcctttaagtggtcctcagctcttactacccttactcaacataagagaattcatactggagagaaaccctacaaatgtgaagagtgtggcaaagcctttaaccagtcctcagcccttactcgacataagatgattcatactggagagaaacccttccaatgtgaagagtgtggcaaagcttttaaccggtcttcacaccttactcaacataagataattcatactaaagagaaaccctacaaatgtgaagagtgtgga

SEQ ID NO: 136 - DNA, 25 bp, Homo sapiens
ggcaaagcctttaaccagtcctcag

SEQ ID NO: 137 - DNA, 500 bp, Homo sapiens
tctatataagcagttaaaacacagaccttcagatcactcctacagtgacagcacagagatggtgaaaatcattgtgcacactgtgcagagtcaggaccgtgtgctcaaggagctgtttggtcatttgagcaagttgttgggctgtaagcagaagattattgatctactccctaaggtggaagtggccctcagtaatatcaaagaagctgacaatactgtcatgttcatgcagggaaaaaggcagaaagaaatatggcatctccttaaaattgcctgtacacagagttctgcccggtcccttgtaggatccagtctagaaggtgcagtaacccctcagacatcagcatggctgcccccgacttcagcagaacatgatcattctctgtcatgtgtggtaactcctcaagatggggagacttcagcacaaatgatagaagaaaatttgaactgccttggccatttaagcactattattcatgaggcaaatgaggaacagggca

SEQ ID NO: 138 - DNA, 61 bp, Homo sapiens
gcacagagatggtgaaaatcattgtgcacactgtgcagagtcaggaccgtgtgctcaagga

SEQ ID NO: 139 - DNA, 79 bp, Homo sapiens
gaatccaagctagaaaacagtccagtggaaaatgttactgctgcttcgactctgctcagtcaagcaaaaattgatacag

SEQ ID NO: 140 - DNA, 500 bp, Homo sapiens
tggaccaaaatttcaaagctaattggaagccgcactgttttacaagtgaagagttatgcaagacagtattttaaaaataaggtcaaatgcggtctggataaagaaacaccaaatcagaagaccggccataatcttcaagttaaaaatgaagataaagggacaaaggcatggacaccatcatgtttaaggggacgtgctgatcccaacttgaatgctgtaaaaattgaaaagttatctgatgatgaagaagtagacatcacagatgaggtggacgagttgtcttctcaaacaccccagaagaattctagcagtgatctcttgttagactttcctaatagtaaaatgcatgaaaccaatcaaggagaattcattacttctgacagccaggaagctctcttttctaagtcttccaggggctgtcttcaaaatgaaaagcaagatgaaacactttcaagctcagaaattacactgtggactgagaaacagagcaatggtgacaa

SEQ ID NO: 141 - DNA, 500 bp, Homo sapiens
aaagaaacaccaaatcagaagaccggccataatcttcaagttaaaaatgaagataaagggacaaaggcatggacaccatcatgtttaaggggacgtgctgatcccaacttgaatgctgtaaaaattgaaaagttatctgatgatgaagaagtagacatcacagatgaggtggacgagttgtcttctcaaacaccccagaagaattctagcagtgatctcttgttagactttcctaatagtaaaatgcatgaaaccaatcaaggagaattcattacttctgacagccaggaagctctcttttctaagtcttccaggggctgtcttcaaaatgaaaagcaagatgaaacactttcaagctcagaaattacactgtggactgagaaacagagcaatggtgacaaaaaatcaattgaattaaatgaccagaaatttaatgaattgattaaaaactgcaacaagcatgatggaaggggaataatagttgatgccaggcagttgcc

SEQ ID NO: 142 - DNA, 36 bp, Homo sapiens
tttttttcatttatgtagtacccgaccatgggaccc

SEQ ID NO: 143 - DNA, 36 bp, Homo sapiens
agaagagaaatgttgcaggaaagattgtttaaaact

SEQ ID NO: 144 - DNA, 500 bp, Homo sapiens
cagcttctaagatgctgtcaaagtttaggaaaatcattaaggaagaaattaacgacattaaagatacagatgtcatcatgaagaggaaaagaggagggagccctgctgtaacacttcttattagtgaaaaaatatctgtggatataaccctggctttggaatcaaaaagtagctggcctgctagcacccaagaaggcctgcgcattcaaaactggctttcagcaaaagttaggaagcaactacgactaaagccattttaccttgtacccaagcatgcaaaggaaggaaatggtttccaagaagaaacatggcggctatccttctctcacatcgaaaaggaaattttgaacaatcatggaaaatctaaaacgtgctgtgaaaacaaagaagagaaatgttgcaggaaagattgtttaaaactaatgaaataccttttagaacagctgaaagaaaggtttaaagacaaaaaacatctggataaattctcttcttatcatgtg

SEQ ID NO: 145 - DNA, 201 bp, Homo sapiens
agaggaaaagaggagggagccctgctgtaacacttcttattagtgaaaaaatatctgtggatataaccctggctttggaatcaaaaagtagctggcctgctagcacccaagaaggcctgcgcattcaaaactggctttcagcaaaagttaggaagcaactacgactaaagccattttaccttgtacccaagcatgcaaagg

SEQ ID NO: 146 - DNA, 36 bp, Homo sapiens
tgttgctgttgatctgtggtgagttgggcaactcag

SEQ ID NO: 147 - DNA, 60 bp, Homo sapiens
ctctaggtaccatccctgacctggtcctcatgctgccgaggctgttgctgttgatctgtg

SEQ ID NO: 148 - DNA, 500 bp, Homo sapiens
atgaggtttattcactggcgtactataaccagccggagcaggaatcagtagcagcagaaaccctggggacacatatggaggacaaggtttccttagacatctattccaggctgaggaaagcaaacattacagatgtggactatgaagatgctatgtaaggttatggaagattctgctctttgaaaaccatccatgaccccaagcctcaggcctgatatgttcttcagagatcctggggcattagctttccagtatacctcttctggatgccattctccatggcactattccttcatctactgtgaagtgaagttggcgcagccctgaagaaactacctaggagaactaatagacacaggagtgacagggactttgttatcagaaccagattcctgccggctcctttgaaaacaggtcatattgtgctcttctgtttacaagaggaaacaagatggaataaaagaaattgggatcttgggttggagggacagtgaagctta

SEQ ID NO: 149 - DNA, 500 bp, Homo sapiens
ggaggcatcagaatcgtagttttcctcttccaggagttcagtcaagtggtcaagtacatgcatttggaaattgttcagacagtgatattttggaggaggatgctgaagtgtatgagcttcgatccagaggaaaagagaaagtccgaagaagtacatcaagagatagacttgacgacattatagtattaacaaaagatatacaagaaggagatacattaaatgcaatagcccttcagtactgttgtacggtagcagatatcaagagagttaacaatctcatcagtgatcaagacttttttgcccttaggtctatcaaaattccagtaaaaaagttcagttccttgaccgaaacactttgtcctccaaaaggaagacagacttcacgtcattcatctgttcaatactcttccgaacaacaggaaattttgccagctaatgattctcttgcttacagtgactcagctggtagctttttaaaagaagtagaccgagacatagaa

SEQ ID NO: 150 - DNA, 230 bp, Homo sapiens
ggaggcatcagaatcgtagttttcctcttccaggagttcagtcaagtggtcaagtacatgcatttggaaattgttcagacagtgatattttggaggaggatgctgaagtgtatgagcttcgatccagaggaaaagagaaagtccgaagaagtacatcaagagatagacttgacgacattatagtattaacaaaagatatacaagaaggagatacattaaatgcaatagcc

SEQ ID NO: 151 - DNA, 105 bp, Homo sapiens
aagatgctcaaggaaataaaatgtgagtcaaggattttatatccagccaaactgatttcagatacaaaaaggacggataaattgtcaacaacacaagaattcaga

SEQ ID NO: 152 - DNA, 36 bp, Homo sapiens
tgactggcagccgagatggtgagtccctgtattcta

SEQ ID NO: 153 - DNA, 500 bp, Homo sapiens
gtcactgtgaagaaaataacattttaagaaacttttctgtcacaattgatagaggaaaagccagtagagaagtacatcttcttgtgtgtgtgtctcatcgtgccactttttgtaactcagcttagtaatgaagccaccattatgtcctcagtcagtgaagtaaatgtggatataaaagatttcctaatgagcattaatttggagcagtatctcttacatttccatgagtctggttttactactgtgaaggactgtgcagcaataaatgacagcctgctgcagaaaattggaatatcacctacaggtcaccgtaggaggatacttaaacagttacagataatcttgtcaaaaatgcaagatattccaatatatgcaaatgttcataaaactaagaagaatgatgacccttcaaaggattaccatgttccatcttctgatcagaatatctgcatagaactttccaattctggtagtgttcagacatctagcccaccgcagtt

SEQ ID NO: 154 - DNA, 77 bp, Homo sapiens
gaggctgtggaaaacaatactctaagcattgaaccagtgggattacaacctatccggtttgtgaaagcttctgcagt

SEQ ID NO: 155 - DNA, 36 bp, Homo sapiens
aagctggaaaaatctgaggctggcttagcaggagct

SEQ ID NO: 156 - DNA, 36 bp, Homo sapiens
tcttttcttattttgcagccctgaaatgagattatc

SEQ ID NO: 157 - DNA, 36 bp, Homo sapiens
aacccttgaaggatgcaggtgatggtgttcgatact

SEQ ID NO: 158 - DNA, 42 bp, Homo sapiens
aatgaggctcttgtacgaatgctacttgatgctggtgtcgaa

SEQ ID NO: 159 - DNA, 36 bp, Homo sapiens
aagttacacatagtacaggtggtgtgtaagaagtac

SEQ ID NO: 160 - DNA, 500 bp, Homo sapiens
tgaaagccctgaaggttttagacaattacttaacatcccccctcccagaagaagtggatgaaaccagtgctgaagatgaaggtgtctctcagaggaagtttttggatggcaacgagctcaccctggctgactgcaacctgttgccaaagttacacatagtacaggtggtgtgtaagaagtaccggggattcaccatccccgaggccttccggggagtgcatcggtacttgagcaatgcctacgcccgggaagaattcgcttccacctgtccagatgatgaggagatcgagctcgcctatgagcaagtggcaaaggccctcaaataagcccctcctgggactccctcaaccccctccattttctccacaaaggccctggtggtttccacattgctacccaatggacacactccaaaatggccagtgggcagggaatcctggagcacttgttccgggatggtgtggtggaagaggggatgagggaaagaaatggggggcctg

SEQ ID NO: 161 - DNA, 36 bp, Homo sapiens
gagtctttgtccaggacgatgagacactcaaagaga

SEQ ID NO: 162 - DNA, 77 bp, Homo sapiens
attttgttgttggtgcgcgacgcagtcagctgcgtgattcccgtgattgcgttacaagctttgtctccttcgacttg

SEQ ID NO: 163 - DNA, 89 bp, Homo sapiens
agtgatgctctccatgctgatgcattcttcatcaaaggaagttttccaggcatctgcgaatgcattgtcaactctcttagaacaaaatg

SEQ ID NO: 164 - DNA, 194 bp, Homo sapiens
aaaaaaggctgtgccttataaccgaatgaaacttatgattgtgggaaatactgggagtggtaaaaccaccttattgcagcaattaatgaaaaccaagaaatcagatcttggaatgcaaagtgccacagttggcatagatgtgaaagactggcctatccaaataagagacaaaagaaagagagatctcgtcctaa

SEQ ID NO: 165 - DNA, 500 bp, Homo sapiens
gtactcatccccattttatgacgcagcgagcattgtaccttgctgtctatgacctcagcaagggacaggctgaagttgatgccatgaagccttggctcttcaatataaaggctcgcgcttcttcttcccctgtgattctcgttggcacacatttggatgtttctgatgagaagcaacgcaaagcctgcatgagtaaaatcaccaaggaactcctgaataagcgagggttccctgccatacgagattaccactttgtgaatgccaccgaggaatctgatgctttggcaaaacttcggaaaaccatcataaacgagagccttaatttcaagatccgagatcagcttgttgttggacagctgattccagactgctatgtagaacttgaaaaaatcattttatcggagcgtaaaaatgtgccaattgaatttcccgtaattgaccggaaacgattattacaactagtgagagaaaatcagctgcagttagatgaaaatgagctt

SEQ ID NO: 166 - DNA, 500 bp, Homo sapiens
atcctgcaggaagctacatcatccatgtctttgatgacccagtttgagcaggaagtatccaacctccaagatatcatgcatgacattcaaaataatgaagaggtgctcactcaaaggatgcaaagccttaatgagaaatttcagaatattacggatttctggaagagaagcctagaagaaatgaacattaatacagacattttcaaatcagaagcaaaacatatacattctcaagtaactgtccaaattaactcagctgagcaggaaataaaattgctcactgaacggctaaaagatttggaagatagcacactaagaaatattagaacagtaaaaagacaagaagaagaagatctcctgcgagtagaggagcagctaggctctgatacaaaggcaattgaaaagttagaagaggaacagcatgccctctttgccagagatgaagatctgactaataaactttccgactacgaacccaaagttgaagaatgcaagacaca

SEQ ID NO: 167 - DNA, 36 bp, Homo sapiens
gagaagaccaagtctgtggtcagtggcagcattaac

SEQ ID NO: 168 - DNA, 500 bp, Homo sapiens
aggaacagaaaagtactaacattgaagatcttcatgtttctcaggcagtcaacagataatgctttgtttggggtatcttttgtcttaaaattgtattattaattaaataacttatttattgtcccaatgttaccaaaatgcaccactaatgtttgtagaaattggagtttctacaaaacacccctcatgtttaactacatttgtgaataaaagctaactcttgtcatctagcttattggatttgacttgaaaaaaaaagtattgtttttacgaagtattttttgtttttttgagatggagtctcgctctgtcacccagactggagtgcagtggcacgatctcggctcactgcaatctctgcctcccggattcaagtgattctcctgcctcagcctcccaagtagctgggaaaacaggcctgtgccaccacaccggagtagtttttgtatttttagtagagatggggtttcaccatgctggccaggctggtcttgaactcc

SEQ ID NO: 169 - DNA, 414 bp, Homo sapiens
ttccgttggacagacagtttctcatccatgaactaaatgcatttgaagaatcaaaggataatacaatacctcttttatatgggattttagcccatttcttgcgtggaactaaggatggcatccagaatgcatttctgaaagggccttcacttcagccttcagacccaagtcttggcagacaacctagtagaagaaagccaatggatgaccacctaagaaaggaggaacagaaaagtactaacattgaagatcttcatgtttctcaggcagtcaacagataatgctttgtttggggtatcttttgtcttaaaattgtattattaattaaataacttatttattgtcccaatgttaccaaaatgcaccactaatgtttgtagaaattggagtttctacaaaacacccctcatgttt

SEQ ID NO: 170 - DNA, 512 bp, Homo sapiens
gaaaaaaatcaacaagataatctctgcttgagaaaaaggaccaaagacaagtgaattttctgagggtgatgaaagtgttgcttcgaaaaggggtgaagtttatatgggtctatttatttgtctaacatgtacagttaaggtttatgccttgcaatgtatgtacatcttcacaaaaaaaatcttaaaaaaattaaatgggtgggggtagggaaagggttgaagtatagatgaagcagaagtggtacatgattagtagttgaagctgggggcaggtctatatattttatttttatgtctttaatagcatttgtataaatgtacaatattcgtttacaatgttagctcaggatcttgtttacctttggacagggagggagggagaaatttattttctgggtaggagtaaagctggttctattcctcagttatgtaaattatctgttataatccaaaaagctttacatgaatgtttctgtatgtaatgtggtatatcaataaaaaattaaatatta

SEQ ID NO: 171 - DNA, 36 bp, Homo sapiens
ccaggagcctgccatgaggttttgagaacagagtgc

SEQ ID NO: 172 - DNA, 36 bp, Homo sapiens
acaccttcatgtttgagggtcacgacacaacatcca

SEQ ID NO: 173 - DNA, 77 bp, Homo sapiens
tgcatgcatttgatggtcggccatctgtagccatggaaggagtaagagctgggtacttcttctcaattcccccttct

SEQ ID NO: 174 - DNA, 225 bp, Homo sapiens
aagatttctaaactggagcaggaaaaagaacattggatgttggaagcacaattagccaaaatcaagctagagaaagaaaaccagcgaattgcagataagctgaagaatacaggtagtgcccagctggttgggctggcccaggaaaatgctgctgtgtcaaatactgctggccaggatgaagccacagctaaggctgtgttggagcccattcagagcaccagtcta

SEQ ID NO: 175 - DNA, 417 bp, Homo sapiens
gctcaacttcatcctgggttgaggcggaggagaacttccagaattatggcgaagtccgggctgaggcaggacccgcagagcacagctgcagccactgtgctaaagcgggcagtagaactagattcggagtcgcggtatccgcaggctctggtgtgttaccaagaggggattgatctgctcctgcaggttctgaaaggtaccaaagataatactaagagatgtaatctcagagaaaaaatttccaaatacatggacagagcggaaaacataaagaagtacttggaccaagaaaaagaagatggaaaatatcacaagcaaattaaaatagaagagaatgcaacaggtttcagttatgagtcactttttcgcgaataccttaatgagacagttacagaagtttggatagaagatccttat

SEQ ID NO: 176 - DNA, 66 bp, Homo sapiens
agagatgtaatctcagagaaaaaatttccaaatacatggacagagcggaaaacataaagaagtact

SEQ ID NO: 177 - DNA, 36 bp, Homo sapiens
ggggagaagggtgacgagggccccccaggcatcaac

SEQ ID NO: 178 - DNA, 169 bp, Homo sapiens
aattctggtacagctcaagttttcagtttagtagcagaacgtagaaagaaatttcaggaaatcatcaatcgcagtagcagtgaagcaaatcaggtggttcgtcccaaaacttcaagtaaatggtctgctcctggttcagctccacagttaactacagccattttggaaa

SEQ ID NO: 179 - DNA, 36 bp, Homo sapiens
agcccagccggagccatggccagtacagtggtagca

SEQ ID NO: 180 - DNA, 36 bp, Homo sapiens
ctgctgcaggatttgcaggccgttacgttttgcaag

SEQ ID NO: 181 - DNA, 26 bp, Homo sapiens
tagcagttggactgaccattgctgct

SEQ ID NO: 182 - DNA, 170 bp, Homo sapiens
gttggactgaccattgctgctgcaggatttgcaggccgttacgttttgcaagccatgaagcatatggagcctcaagtaaaacaagtttttcaaagcctaccaaaatctgccttcagtggtggctattatagaggtgggtttgaacccaaaatgacaaaacgggaagcagc

SEQ ID NO: 183 - DNA, 38 bp, Homo sapiens
ccatgaagcatatggagcctcaagtaaaacaagttttt

SEQ ID NO: 184 - DNA, 331 bp, Homo sapiens
cctgccgtgttgcgtagggcgcctgtgcttgaggttgggggttgcgtcgctctctggtaaaggcgtgcaggtgttggccgcggcctctgagctgggatgagccgtgctcccggtggaagcaagggagcccagccggagccatggccagtacagtggtagcagttggactgaccattgctgctgcaggatttgcaggccgttacgttttgcaagccatgaagcatatggagcctcaagtaaaacaagtttttcaaagcctaccaaaatctgccttcagtggtggctattatagaggtgggtttgaacccaaaatgacaaaacgggaagcagc

SEQ ID NO: 185 - DNA, 390 bp, Homo sapiens
gaggatgtcagcgagcctgacattgccctccctgaatgcatcaaatactcttctccaaggactgacaaaaacaaccccccggctgtgggcacagtagggaaccatgccggtttgatcttccattgctcaagccagggaatgcattgcagaggcacctgcacaacgacaaacttgagtgtttccctgccacttctgtgcctccacagcctgctccagttccgcagctagagctgggcctaccttccccagccagccctgccacacacctggctgaggcatgtctgggaggggtggaggaggcagagggactccaggccagagggctgttctcacaacctcagcccactctcagtcaaggagggcagaaaataaaagatgacatcactgcca

SEQ ID NO: 186 - DNA, 36 bp, Homo sapiens
catcaaggaaaatgaaaggttgcacagtgaattaaa

SEQ ID NO: 187 - DNA, 500 bp, Homo sapiens
tccccagcaatcttcagtctctcaccagggccagggactcgtctggggcgcgggggaaagaagcgtggcggggctgtagatgccgcgtgagtaggatgcagattgcaccgctggagcgcttgacaaccaaccgagcgttggcttagttttgttttcccgcacagcaagctctctgtctttcagaggaaggtaaaggtggtgaaagctctaaactaaaattgtatcgaaatggctgcagaaatcgactttctgagagagcaaaatcgaagactaaatgaagattttaggcggtatcaaatggaaagtttttccaaatattcatctgtacagaaagctgtctgccaaggagaaggagacgacacatttgaaaacctagtatttgaccaaagctttttagctcctcttgttactgagtatgataaacacctaggagaactaaatgggcagctgaaatattaccagaaacaggtgggtgagatgaaattacaacttgaaaatgt

SEQ ID NO: 188 - DNA, 39 bp, Homo sapiens
ggccaaattgaacgagtcattaaggaaaaaaaagcagtg

SEQ ID NO: 189 - DNA, 500 bp, Homo sapiens
cacctctcagagaagaaataatggcaaataacttttccttggagagtcataacatatcactgactgaacattctagtatgccagtagaaaaaaatatcactttagaaaggccttctaatgtaaatctcacatgccagttcacaacatctggggatttgaatgcagtaaatgtgacttggaaaaaagatggtgaacaacttgagaataattatcttgtcagtgcaacaggaagcaccttgtatacccaatacaggttcaccatcattaatagcaaacaaatgggaagttattcttgtttctttcgagaggaaaaggaacaaaggggaacatttaatttcaaagtccctgaacttcatgggaaaaacaagccattgatctcttacgtaggggattctactgtcttgacatgtaaatgtcaaaattgttttcctttaaattggacctggtacagtagtaatgggagtgtaaaggttcctgttggtgttcaaatgaataaatat

SEQ ID NO: 190 - DNA, 36 bp, Homo sapiens
ctgttttgttttgcacagagctctcccagttattgc

SEQ ID NO: 191 - DNA, 500 bp, Homo sapiens
gctgaccagtactaccagagaactttactgaagaaagtctggaaagtctggcgttccgtagtgcaaaagcagtggaaagatgtggtagaaagagcttgtcaagcaagagctgaagaagtttgtatccagatttccaatgattatgaagccaaagttgctatgttatctggagctttggaaaatgcaaaagctgagattcaaagaatgcaacatgaaaaagagcactttgaagattccatgaaaaaagctttcatgaggggtgtatgtgcattaaatcttgaagccatgactatatttcaaaacagaaatgatgcagggatagactccacaaataataaaaaggaagagtatggtcctggtgttcaaggaaaagaacattctgctcatttggatccttcagctcctccgatgcccttaccagttacatcaccactgctgccatccccaccagccgccgtcggaggagccagcgcgactgccgttccctcagctgcttcgat

SEQ ID NO: 192 - DNA, 242 bp, Homo sapiens
ataaaaaggaagagtatggtcctggtgttcaaggaaaagaacattctgctcatttggatccttcagctcctccgatgcccttaccagttacatcaccactgctgccatccccaccagccgccgtcggaggagccagcgcgactgccgttccctcagctgcttcgatgacttctaccagggctgcttccgcatcttctgttcacgttcctgtttctgctcttggtgcaggatctgcagctact

SEQ ID NO: 193 - DNA, 390 bp, Homo sapiens
tggccattttcgttggtggtgttcagttgtggcggttgctggtcagtaacagccaagatgctgcggaatctgctggctcttcgtcagattgggcagaggacgataagcactgcttcccgcaggcattttaaaaataaagttccggagaagcaaaaactgttccaggaggatgatgaaattccactgtatctaaagggtggggtagctgatgccctcctgtatagagccaccatgattcttacagttggtggaacagcatatgccatatatgagctggctgtggcttcatttcccaagaagcaggagtgacttcagtcatcccagcaatcgcttggttcagtttcattcagctctctatggaccagtaatctgataaataaccgagctctt

SEQ ID NO: 194 - DNA, 54 bp, Homo sapiens
cagaggacgataagcactgcttcccgcaggcattttaaaaataaagttccggag

SEQ ID NO: 195 - DNA, 54 bp, Homo sapiens
ccattttcgttggtggtgttcagttgtggcggttgctggtcagtaacagccaag

SEQ ID NO: 196 - DNA, 36 bp, Homo sapiens
cactaaatcgtctccaagttcgaagcattcagcaaa

SEQ ID NO: 197 - DNA, 112 bp, Homo sapiens
ttttgtttttcagctcacttcaagggtacctgaagcgaattggcaccaaagcagcagctgtattgccgcagttctagcttcaccttcacgatgtttcccttggtcaaaagcg

SEQ ID NO: 198 - DNA, 61 bp, Homo sapiens
cagcagctgtattgccgcagttctagcttcaccttcacgatgtttcccttggtcaaaagcg

SEQ ID NO: 199 - DNA, 89 bp, Homo sapiens
caatggcaaggcagagccaccagaaacgtacacctgattttcatgacaaatacggtaatgctgtattagctagtggagccactttctgt

SEQ ID NO: 200 - DNA, 500 bp, Homo sapiens
aaggtgcaatcttgagaatggcatttctggataccacaggctgcttaataccacctgcgtatgaaccctggagagagcacaatgttcctgaagaaaaagacgaaaaggagaaattgaaaaaacggcggcctgtctcagtatccccctcctcttctcaggaaattagtgaaaaccagtatgcagtgatatgttctgaaaagcaagcaaaagtaatctcactgccaacccagaactgtgcttataagcaaaatattacagagacctcgtttgtgcttcgtggagatattgtagcattgagtaacagtatctgccttgcctgtttctgtgccaatggacatataatgacttttagtttgccaagtttaagacctctgttggatgtgtattacttgccccttaccaatatgcggatagccagaacgttctgctttaccaacaatggacaagcattataccttgtttcacctacagaaatccagagacttacttatagtcaagag

SEQ ID NO: 201 - DNA, 500 bp, Homo sapiens
ggtaattggggcttgggtgctcaaagttacccagaaataattattacagggcatgctgatgggtcagttaagttctgggatgcttctgcaataactctacaagtattatataagctaaagacatctaaagtatttgaaaagtcaagaaataaagatgacaggccaaacacagacattgtagatgaagatccatatgccattcagatcatctcctggtgtccagaaagtagaatgctgtgcatcgctggagtttcagctcatgtcattatttatagattcagcaagcaggaagtaatcacagaagtcattccgatgcttgaagttcgattattatatgagataaatgatgtggaaactccggagggtgagcagccaccacctttgccaacacccgtgggagggtccaaccctcagcccatccctcctcagtctcatccatctaccagtagcagttcatctgatgggcttcgtgataatgtaccttgtttaaaagttaaaaa

SEQ ID NO: 202 - DNA, 36 bp, Homo sapiens
gaggagggccctgggaagaatttgccattttcagtg

SEQ ID NO: 203 - DNA, 41 bp, Homo sapiens
tccggaggttcacaacctctgtggtccgtaggagccactat

SEQ ID NO: 204 - DNA, 36 bp, Homo sapiens
gcagagcttccagcagcggtatgttgggccagagca

SEQ ID NO: 205 - DNA, 36 bp, Homo sapiens
gcagagcttccagcagcgaatttgccattttcagtg

SEQ ID NO: 206 - DNA, 69 bp, Homo sapiens
caaggtcgtgaaaaaaaaggtcttggtgaggtgccgccatttcatctgtcctcattctctgcgcctttc

SEQ ID NO: 207 - DNA, 139 bp, Homo sapiens
gtgaaaaaaaaggtcttggtgaggtgccgccatttcatctgtcctcattctctgcgcctttcgcagagcttccagcagcggtatgttgggccagagcatccggaggttcacaacctctgtggtccgtaggagccactat

SEQ ID NO: 208 - DNA, 146 bp, Homo sapiens
caaggtcgtgaaaaaaaaggtcttggtgaggtgccgccatttcatctgtcctcattctctgcgcctttcgcagagcttccagcagcggtatgttgggccagagcatccggaggttcacaacctctgtggtccgtaggagccactat

SEQ ID NO: 209 - DNA, 500 bp, Homo sapiens
tttcaaatctgccattacccattcccacagtggatgcttcaataccgacaagccaaaatggttttgggtacaagatgccagatgtccctgatgcatttccagaactctcagaactaagtgtgtcacaactcacagatatgaatgaacaagaggaggtattactagaacagtttctgactttgcctcaactaaaacaaattattaccgacaaagatgacttagtaaaaagtattgaggaactagcaagaaaaaatctccttttggagcccagcttggaagccaaaagacaaactgttttagataagtatgaattacttacacagatgaagtccactttcgaaaggaagatgcaaaggcagcatgaacttagtgagagctgtagtgcaagtgcccttcaggcaagattgaaagtagctgcacatgaagctgaggaagaatctgataatattgcagaagatttcttggagggaaagatggaaatagatgattttctcagtagc

SEQ ID NO: 210 - DNA, 36 bp, Homo sapiens
ttgctcctgtcctttgtggtattgctgcaggtttga

SEQ ID NO: 211 - DNA, 500 bp, Homo sapiens
actgataacacatgggtgccaggtgtgccaacttgtatcaaaaaagccttcatagggtgtccacctccgcctaagacccctaacgggaaccatactggtggaaacatagctcgattttctcctggaatgtcaatcctgtacagctgtgaccaaggctacctgctggtgggagaggcactccttctttgcacacatgagggaacctggagccaacctgcccctcattgtaaagaggtaaactgtagctcaccagcagatatggatggaatccagaaagggctggaaccaaggaaaatgtatcagtatggagctgttgtaactctggagtgtgaagatgggtatatgctggaaggcagtccccagagccagtgccaatcggatcaccaatggaaccctcccctggcggtttgcagatcccgttcacttgctcctgtcctttgtggtattgctgcaggtttgatacttcttaccttcttgattgtcattaccttatacgtgat

SEQ ID NO: 212 - DNA, 38 bp, Homo sapiens
aaggtgccagattgacagctttggaaactgaaggactc

SEQ ID NO: 213 - DNA, 34 bp, Homo sapiens
gaatatgagtgatgacaaaccctttctatgtact

SEQ ID NO: 214 - DNA, 500 bp, Homo sapiens
gtttgaaaagaagaaaaatgataccttagaccccgaacctttcgttgattgcaaggagtgtggccggaagatgcatcagatttgcgttctgcactatgacatcatttggccttcaggttttgtgtgcgacaactgcttgaagaaaactggcagacctcgaaaagaaaacaaattcagtgctaagaggctgcagaccacaagactgggaaaccacttggaagaccgagtgaacaaatttttgcggcgccagaatcaccctgaagccggggaggtttttgtccgagtggtggccagctcagacaagacggtggaggtcaagcccgggatgaagtcacggtttgtggattctggggaaatgtctgaatctttcccatatcgaaccaaagctctgtttgcttttgaggaaattgacggcgtggatgtctgcttttttggaatgcacgtccaagaatacggctctgattgcccccctccaaacacgaggcgtgtgtacatttctt

SEQ ID NO: 215 - DNA, 500 bp, Homo sapiens
cttgaagaaaactggcagacctcgaaaagaaaacaaattcagtgctaagaggctgcagaccacaagactgggaaaccacttggaagaccgagtgaacaaatttttgcggcgccagaatcaccctgaagccggggaggtttttgtccgagtggtggccagctcagacaagacggtggaggtcaagcccgggatgaagtcacggtttgtggattctggggaaatgtctgaatctttcccatatcgaaccaaagctctgtttgcttttgaggaaattgacggcgtggatgtctgcttttttggaatgcacgtccaagaatacggctctgattgcccccctccaaacacgaggcgtgtgtacatttcttatctggatagtattcatttcttccggccacgttgcctccgcacagccgtttaccatgagatccttattggatatttagagtatgtgaagaaattagggtatgtgacagggcacatctgggcctgtcctccaagtg

SEQ ID NO: 216 - DNA, 115 bp, Homo sapiens
tgggaaaccacttggaagaccgagtgaacaaatttttgcggcgccagaatcaccctgaagccggggaggtttttgtccgagtggtggccagctcagacaagacggtggaggtcaa

SEQ ID NO: 217 - DNA, 500 bp, Homo sapiens
ttttccccacagactttgtgctgctatgggaagcagctgtgtaccattcctcgcgatgctgcctactacagctatcagaataggtatcatttctgtgagaagtgtttcacagagatccagggcgagaatgtgaccctgggtgacgacccttcacagccccagacgacaatttcaaaggatcagtttgaaaagaagaaaaatgataccttagaccccgaacctttcgttgattgcaaggagtgtggccggaagatgcatcagatttgcgttctgcactatgacatcatttggccttcaggttttgtgtgcgacaactgcttgaagaaaactggcagacctcgaaaagaaaacaaattcagtgctaagaggctgcagaccacaagactgggaaaccacttggaagaccgagtgaacaaatttttgcggcgccagaatcaccctgaagccggggaggtttttgtccgagtggtggccagctcagacaagacggtggaggtcaa

SEQ ID NO: 218 - DNA, 86 bp, Homo sapiens
ctctgtagcctggacgtactttgaagcccctccccacgatgctgtacgtgcacaatggttactaggcaatccgtacatcaggagaa

SEQ ID NO: 219 - DNA, 36 bp, Homo sapiens
tggaacttgcctctgcaggtaaaatcccagaggaat

SEQ ID NO: 220 - DNA, 210 bp, Homo sapiens
tttgcctaaggggataaggaaaaataatgtgaaagttgcagtccttatcagaagtaattgattagaattcagcaatgaatatgccaaatcgtacttatttcagatgatgcagccaacacgaacggttgtcatgtgtaacacaactttcgatcaccgcgaaaacaccgtcctgggaaagcgtccatgcttgatatcgtttggttcatgaac

SEQ ID NO: 221 - DNA, 500 bp, Homo sapiens
cggtctcctcctctggaaatcaaagtcttaggggacattaaaaggttaatgctctcagtccgaaaattgcagaaaatacatattgatgttttagaagagatgggctacaacagtgacagtcccatgggttccatgacccctttcatcagtgctcttcagagtacagactggctctgtaatggggagctttcccatgactgtgacggacccataactgacttgaattctgatcagtaccagtacatgaatggtaaaaacaaacattctgttcgaagattggacccagaatactggaagactatactgagttgtatatatgtttttatagtatttggatttacatctttcattatggttatagtccatgagcgagtgcctgacatgcagacctatccaccactcccagatatattcttagacagcgttcctagaatcccatgggcctttgccatgacggaagtatgtggcatgattctgtgctatatttggctcctggttct

SEQ ID NO: 222 - DNA, 36 bp, Homo sapiens
aggatgccaagccatgaggtgagaacaaagagactg

SEQ ID NO: 223 - DNA, 44 bp, Homo sapiens
agattatgcgtctgacaggaacaccccccgcttatctcattaac

SEQ ID NO: 224 - DNA, 500 bp, Homo sapiens
ctagctgtgaatgaagactgtgagctgaagattctggattttggactggctcggcacacagatgatgaaatgacaggctacgtggccactaggtggtacagggctcctgagatcatgctgaactggatgcattacaaccagacagttgatatttggtcagtgggatgcataatggccgagctgttgactggaagaacattgtttcctggtacagaccatattaaccagcttcagcagattatgcgtctgacaggaacaccccccgcttatctcattaacaggatgccaagccatgaggcaagaaactatattcagtctttgactcagatgccgaagatgaactttgcgaatgtatttattggtgccaatcccctggctgtcgacttgctggagaagatgcttgtattggactcagataagagaattacagcggcccaagcccttgcacatgcctactttgctcagtaccacgatcctgatgatgaaccagtggccgatcc

SEQ ID NO: 225 - DNA, 101 bp, Homo sapiens
ccttgacactggtgcctgcagagctggtgcggattcgaggggaggctgcccagatcgtgtgctcagccagcagcgttgatgttaactttgatgtcttcctc

SEQ ID NO: 226 - DNA, 36 bp, Homo sapiens
catttgtgtatttttcagaatcagcaatctaagtcc

SEQ ID NO: 227 - DNA, 36 bp, Homo sapiens
ctgggaccgagatggaagtcatgatttcattggaga

SEQ ID NO: 228 - DNA, 500 bp, Homo sapiens
aaaggaaaaaagaaaaaatatactaattctggaacagtaactttactctctttcttggtagaaacagaagtttcattccttgactacattaagggagggacgcaaatcaatttcacagtggctattgattttacagcatcaaacggcaaccctgctcagcccacttccctccactacatgaatccttaccaactgaatgcctatggtatggcactaaaagcagtgggagaaattgttcaagattatgacagtgataaaatgtttccagctctaggatttggtgcaaaactgcctccagatggaaggatatctcacgaatttgctttgaatgggaatcctcaaaacccctactgtgatggcattgagggggtcatggaggcttattacaggagtctgaaatctgtacaactatatgggcccaccaactttgctcctgtaattaatcatgtagcaagatatgcttcttctgtaaaggatggctcccagtattttgtgcttct

SEQ ID NO: 229 - DNA, 36 bp, Homo sapiens
aaactctgtttttttcaggtcgaatgagtgatttga

SEQ ID NO: 230 - DNA, 500 bp, Homo sapiens
cagagccaacagaagtaagagatatggaggaagactttacagcaactccaggtactacaaaatatgatgaaaatattacaacagtgcttttggcccatggtactttaagtgttgaagcagccactgtatcaaaatggtcatgggatgaagataatacaacatccaagcctttagagtctacagaaccttcagcctcttcaaaattgccccctgccttactcacaactgtggggatgaatggaaaggataaagacatcccaagtttcactgaagatggagcagatgaatttactcttattccagatagtactcaaaagcagttagaggaggttactgatgaagacatagcagcccatggaaaattcacaattagatttcagccaactacatcaactggtattgcagaaaagtcaactttgagagattctacaactgaagaaaaagttccacctatcacaagcactgaaggccaagtttatgcaaccatggaaggaagtgct

SEQ ID NO: 231 - DNA, 500 bp, Homo sapiens
aagaccatagctcaaaaggaaggccgagggagaagttagaaagggatgatgaacgaagcgttttgaggggactgcaacgccgcggcaatacccgcccctgagctgcgcgcactaccgcctcggtagctgtcatggccgccgggtcacgtgactccggcttggcgccgtcctggttttccgtcaccctggttctgtagtctcggttctccgactccctctttttctcgcttgtggactccgatatattgcccttcttcccttagaagaactgctgaaccgactctgagaaatttgaaaacatctggagaaaatgacccattggtttcataggaacccattaaaagccacagctcctgtgtcttttaattactatggtgtagtcactggcccttctgcttcaaaaatatgcaatgacttgaggtcatccagggcacgactccttgaactgttcactgatttgagctgtaatccagaaatgatgaagaatgcagcagattcat

SEQ ID NO: 232 - DNA, 457 bp, Homo sapiens
atggcagcggaggagaaggaccctctgagctattttgcggcatacgggagcagcagctcaggctcctcggacgaggaggataacatcgagccggaggagacgagtcgcagaaccccggatccggcgaagtcggcgggcggctgtaggaacaaggcggagaagcggctcccgggacctgacgagctgtttaggagcgtgactcgcccggcctttctctacaatccgctcaacaaacagatagactgggagaggcacgtcgtcaaggcgcctgaggagcctccaaaggaattcaaaatatggaagtcaaattatgtaccacctcctgagacctacaccactgagaagaagcctccgcctccagagcttgacatggcaataaaatggtctaacatatatgaggacaatggtgatgatgctccacagaatgctaagaaagctaggcttctaccagaagggg

SEQ ID NO: 233 - DNA, 286 bp, Homo sapiens
ggctgcggtacggcgtgttggtcccagcggttcagctgaggtagggacgtgctgtaggccggaatgttaccggctgttggatctgcggatgaggaggaggatcctgcggaggaggattgtcctgaattggttcccatggagacgacgcaaagcgaggaggaggaaaagtctggcctcggcgccaagatcccagtcacaattatcaccgggtatttaggtgctgggaagacaacacttctgaactatattttgacagagcaacatagtaaaagagtagcggtcattt

SEQ ID NO: 234 - DNA, 36 bp, Homo sapiens
agtctttgaggaatgctcgccaaaacagcttcatga

SEQ ID NO: 235 - DNA, 500 bp, Homo sapiens
gatagcagctctgatgacgatttggatgaatatacccttagaaaaaatgtggcagttaactgtagtactgaatggaagtggcttgtagacagagcacgagttggcagccgatggacttggcttcaagctcagatttcagacctagaatgcaaaatccaacaactaacagacattcacaggcaaattcgtgcctccaaggggatagtggtcctagaagaatgtcagcttccaaaagatattttgaaaaaacaaatgcaatttgcagaccaagcagcttcactaaacattctagggaatcctcaggttccccaggagtgtcaagatcctgtaccggaacaagattttgaaatgtcaccaagcagccctactttacttcttcgaaacatcgaaaaacagagtgcacagttgactgagatcatcaacagtttgattgcccctctcaacttgtccccaacttcatcacccctctcttccaaatcctgtagccataaatgtctggc

SEQ ID NO: 236 - DNA, 168 bp, Homo sapiens
caggaatcgccatgaccccagctctgagggaggcaacagcaaagggtatcagcttttcatctttgccaagtaccatggagtctgacaagatgctctacatggaaagtcccagaactgtagatgaaaagctaaagggagacaccttttctcagatgcttggatttccaa

SEQ ID NO: 237 - DNA, 106 bp, Homo sapiens
gaagtggcttgtagacagagcacgagttggcagccgatggacttggcttcaagctcagatttcagacctagaatgcaaaatccaacaactaacagacattcacagg

SEQ ID NO: 238 - DNA, 500 bp, Homo sapiens
agggtgagagaaaatgaattctaatttacctgcagagaacttaaccattgcagtcaatatgaccaagactttgcctacagcagtaacgcatggatttaattccactaatgacccaccttcaatgtcaattacaaggctttttccagccttactggaatgctttggcattgtcctttgtggctacatagcaggaagggccaatgtcataacatcaacccaggccaaaggactaggaaattttgtctccagatttgcacttccagctttattattcaaaaacatggttgtacttaatttttccaatgtggactggtccttcctatatagtatcttaattgccaaagcttctgtatttttcattgtatgtgtattaaccttattggttgccagtcctgatagtcgatttagcaaagctggactattccctatttttgctacacaaagtaatgactttgcattgggataccctatagttgaagctttatatcaaactacatacc

SEQ ID NO: 239 - DNA, 192 bp, Homo sapiens
gtttttaaatgctgaaagttactataagaaagccttggctttggatgagacttttaaagatgcagaggatgctttgcagaaacttcataaatatatgcagaaatctttggaattaagagaaaaacaagctgaaaaggaagaaaagcagaaaacaaagaaaatagaaacaagtgcagaaaagttgcgtaagct

SEQ ID NO: 240 - DNA, 36 bp, Homo sapiens
tgattttgcttctgcattgagaaaaaaacaatccgc

SEQ ID NO: 241 - DNA, 36 bp, Homo sapiens
tttcttgttctcacacaggaagaacacccaaaccca

SEQ ID NO: 242 - DNA, 471 bp, Homo sapiens
ggggggaggcgttccggtccccaagagacccgcggagggaggcggaggctgtgagggactccgggaagccatggacgtcgagaggctccaggaggcgctgaaagattttgagaagagggggaaaaaggaagtttgtcctgtcctggatcagtttctttgtcatgtagccaagactggagaaacaatgattcagtggtcccaatttaaaggctattttattttcaaactggagaaagtgatggatgatttcagaacttcagctcctgagccaagaggtcctcccaaccctaatgtcgaatatattccctttgatgaaatgaaggaaagaatactgaaaattgtcactggatttaatggtatcccttttactattcagcgactatgtgaattgttaacagatccaaggagaaactatacaggaacagacaaatttctcagaggagtagaaaagaatgtgatggttgttagctg

SEQ ID NO: 243 - DNA, 61 bp, Homo sapiens
aaaaggaagtttgtcctgtcctggatcagtttctttgtcatgtagccaagactggagaaac

SEQ ID NO: 244 - DNA, 91 bp, Homo sapiens
tgtgctcttggtgtgctcctctgcagtggcacagttgcataaagatcctaccctggatcaccactggcatctctggaagaaaacctatggc

SEQ ID NO: 245 - DNA, 36 bp, Homo sapiens
ctttgtgttgtttgacagacagcatcgcacagaatt

SEQ ID NO: 246 - DNA, 36 bp, Homo sapiens
atcgccggcctcgctatgtctgccattttcaatttt

SEQ ID NO: 247 - DNA, 153 bp, Homo sapiens
ctgttgaagttcctttgaatcacaaacggtttgtttgtgatctaactcaagctgatcgtcttgccctctatgatttcgtagttgaggagacaaagaaaaagcgctctgattctcaaattattgaaaatgacagcgatctctttgtagacttgg

SEQ ID NO: 248 - DNA, 500 bp, Homo sapiens
gtctgcgggggcctgaggggcggcggcggcggcggcggctgcgatatggagccaggggccggcggccgaaatactgctcgtgcgcagagggccgggtccccgaacactccgccgccccgggagcaggagcggaaactggagcaggagaagctctccggtgtggtgaagagcgtccaccggcggctccgcaagaagtaccgagaagtgggagattttgataagatctggcgagaacactgtgaggatgaagaaactctttgtgaatatgccgttgcaatgaaaaatttggcagataatcattgggcaaaaacttgtgagggcgaaggtcgtattgaatggtgttgtagtgtatgcagagaatatttccaaaatggtgggaagagaaaagcacttgagaaagatgaaaaaagagctgtacttgccactaagaccactccagccttaaatatgcatgagtcttctcaacttgaaggtcatttaaccaacctcagctttacaaa

SEQ ID NO: 249 - DNA, 36 bp, Homo sapiens
ctccttcttttgttacagctaatcaggcagcaaaag

SEQ ID NO: 250 - DNA, 500 bp, Homo sapiens
caaagatctagttgcgcaaactgcacagccagaccaacccaattatggttttcctctggatctcttacgctgtgaaagccttcttggtttggaccctgcaacttgcagcagagttctaaacaaaaattacacgctgcttgtttccatggctcccctcaccaatgaaatccggcctgtcagcagctgcacccctcagcatattggaccagctatcccagaagtcagctctgtctggtttaaactgtacatttatcatgtcactggacaaggaccaccatcccttttattgtccaaaggtacaagacttcgaaaactgccagatatatttcagagttatgatcgattgctaataacatcttggggtcatgatcctggagtagttcctacctcaaatgtgctcacgatgttgaatgatgctttaacacattctgcagttttaattcaggggcatggtctgcatgggataggagaaactgtccatgtcccatttccatttgatg

SEQ ID NO: 251 - DNA, 36 bp, Homo sapiens
caagaactggaagtggagctgtacgattctgtgacc

SEQ ID NO: 252 - DNA, 195 bp, Homo sapiens
ccagtaaataagatttctttcattgcccgtgatgtgacagacaaccgggcatttggttacgtgtgtggaggagaaggccagcatcagttttttaccataaaaaccgggcaacaggctgaaccattagttgttgatcttaaagacctttttcaagttatctataatgtaaagaaaaaggaagaagaaaagaaaaag

SEQ ID NO: 253 - DNA, 36 bp, Homo sapiens
gagtctttgacagttgaggtgtgtgtaataagactt

SEQ ID NO: 254 - DNA, 500 bp, Homo sapiens
gaagagactccaggcaggggaagctgaaaggacctttcactccctacttttggccagggccttctgtgccacctgccaagaccagcaggcctaccctctgaagaggtccaagcaacggaagtactactacgaagctgcctttctggccatccttgagaaaaatagacagatggccaaggagaggggcctaataagccccagtgattttgcccagctgcaaaaatacatggaatactccaccaaaaaggtcagtgatgtcctaaagctcttcgaggatggcgagatggctaaatatgtccaaggagatgccattgggtacgagggattccagcaattcctgaaaatctatctcgaagtggataatgttcccagacacctaagcctggcactgtttcaatcctttgagactggtcactgcttaaatgagacaaatgtgacaaaagatgtggtgtgtctcaatgatgtttcctgctacttttcccttctggagggtggtcggc

SEQ ID NO: 255 - DNA, 384 bp, Homo sapiens
agttcctgccagtgagtccctaggcctccatctctctcccttgctgtaccaccttcaccaccatccatgcgaccccaagagccttaatgactctagaagagactccaggcaggggaagctgaaaggacctttcactccctacttttggccagggccttctgtgccacctgccaagaccagcaggcctaccctctgaagaggtccaagcaacggaagtactactacgaagctgcctttctggccatccttgagaaaaatagacagatggccaaggagaggggcctaataagccccagtgattttgcccagctgcaaaaatacatggaatactccaccaaaaaggtcagtgatgtcctaaagctcttcgaggatggcgagatggct

SEQ ID NO: 256 - DNA, 27 bp, Homo sapiens
acttcacgggcaaggccaagtgggatg

SEQ ID NO: 257 - DNA, 82 bp, Homo sapiens
gcagaggaggttaggcaccttaagaccaagccatcggatgaggagatgctgttcatctatggccactacaaacaagcaactg

SEQ ID NO: 258 - DNA, 36 bp, Homo sapiens
gttactactcatgcctagcacgtcatcggaaaattc

SEQ ID NO: 259 - DNA, 36 bp, Homo sapiens
ccgcgaggccggaaaatggactcagtggcttttgag

SEQ ID NO: 260 - DNA, 126 bp, Homo sapiens
actctgtgaaggtaaagaaggtagtcaatgtgcagaaaacttcagtcccaatctcagtgtgacgaagaagactgccggagtaaaaccatatgagtgtactatctgtggaaaagccttcatgcgtct

SEQ ID NO: 261 - DNA, 170 bp, Homo sapiens
gatgtggctgtgaacttcacacttgaggagtgggctttgctggatccttcccagaagaaactctacagagatgtgatgcgggaaacctttagaaacctggcctgtgtaggaaaaaaatgggaagaccagagcattgaagattggtacaaaaatcaggggagaattttaag

SEQ ID NO: 262 - DNA, 59 bp, Homo sapiens
ggaatccaaatacctgaagaaaagggaagatagcattcctttacgcggactcagccaga

SEQ ID NO: 263 - DNA, 500 bp, Homo sapiens
ttcaagccagaagaatgatgtttttcacttggatgttaaaaatgtcagtggcatagggcagatcctggacttcatgtacacttctcatctagatcttaaccaggacaatatacaagtaatgctggacacagcacagtgtttgcaagttcaaaatgttctgagtctgtgtcacacatttttaaaatcagccactgtagtacagccacctggcatgccttgtaatagtacattgtctctacaaagcaccctgaccccagatgccacttgtgttatcagtgaaaactacccccctcatttactgcaggaatgttcagcagatgcacagcagaacaaaacgttggatgaatcgcatccgcatgcttcaccatcagttaatcgtcatcactccgcaggtgaaatctcaaaacaagctcctgatacttcagatggcagctgcacagaactgcctttcaaacagccaaattactattacaaactcagaaacttttacagtaagcagt

SEQ ID NO: 264 - DNA, 267 bp, Homo sapiens
aaaaaatcccagaagaaaaacttggaagatgagaaagaagtatgcccaaaagccaagtcagaagaatcatttgtattaaatgagacaaagaaaaatatagttaacacagatgtgccccatcaacatccagaattacttcattcatcttccttggtaaagccaccagctcccaaaacaggaagtatacaaaataacatgttaactcttaatctagttaaacaacatactgggaaaccagaatctaccttggaaacatcagttaaccaa

SEQ ID NO: 265 - DNA, 500 bp, Homo sapiens
cgtttatgtgatagatggaggaaaaataaaagagacgcattttgatactcagaacaatatcagtacaatgtccgctgagtgggttagtaaagctaatgccaaacagagaaaaggtcgagctggaagagttcaacctggtcattgctatcatctgtataatggtcttagagcaagtcttctagatgactatcaactgccagaaattttgagaactcctttggaagaactttgtttacaaataaagattttaaggctaggtggaattgcttattttctgagtagattaatggacccaccatcaaatgaggcagtgttactctccataagacacctgatggagctgaacgctttggataaacaagaagaattgacacctcttggagtccacttggcacgattacccgttgagccacatattggaaaaatgattctttttggagcactgttctgctgcttagacccagtactcactattgctgctagtctcagtttcaaagatc

SEQ ID NO: 266 - DNA, 36 bp, Homo sapiens
cgcttatttaccatcaagcaatccatggcagaggga

SEQ ID NO: 267 - DNA, 77 bp, Homo sapiens
tgtgctaacactgaagacttggagacagttattcaccatgtacacagcctgtacccttctgctcctttcctggcagc

SEQ ID NO: 268 - DNA, 123 bp, Homo sapiens
cagaggagtggcgggggagaatctcttgacgccaaggacttattgttgtgctaacactgaagacttggagacagttattcaccatgtacacagcctgtacccttctgctcctttcctggcagc

SEQ ID NO: 269 - DNA, 234 bp, Homo sapiens
agacagcttaacagaaaaggaatgtgtgaaggagaaattgaatctcttgcacgaatttctgcaaacagaaataaagaatcagttatgtgacttggaaaccaaattacgtaaagaagaattatccgaggagggctacctggctaaagtcaaatcccttttaaataaagatttgtccttggagaacggtgctcatgcttacaaccgggaagtgaatggacgtctagaaaacgggaa

SEQ ID NO: 270 - DNA, 46 bp, Homo sapiens
cgaagaaaaagaacctgaaaaagtaaatccacagatttctgatgaa

SEQ ID NO: 271 - DNA, 36 bp, Homo sapiens
tctccgagaagcaatgaggtaagtctgggtcaccat

SEQ ID NO: 272 - DNA, 36 bp, Homo sapiens
caattgatttccccgtaggtattcaaagcaatgagt

SEQ ID NO: 273 - DNA, 232 bp, Homo sapiens
atgcctgaaatgtgcagatgccccgtgtcagaagagctgtccaactaatcttgatattaaatcattcatcacaagtattgcaaacaagaactattatggagctgctaagatgatattttctgacaacccacttggtctgacttgtggaatggtatgtccaacctctgatctatgtgtaggtggatgcaatttatatgccactgaagagggacccattaatattggtggattg

SEQ ID NO: 274 - DNA, 161 bp, Homo sapiens
atcccacagatcagaaatccttcgctgcctcccccagaaaaaatgtctgaagcctattctgcaaagattgctctttttggtgctgggcctgcaagtataagttgtgcttcctttttggctcgattggggtactctgacatcactatatttgaaaaacaaga

SEQ ID NO: 275 - DNA, 36 bp, Homo sapiens
tatgttttgggtgtttaggctagacagcaacaagca

SEQ ID NO: 276 - DNA, 500 bp, Homo sapiens
gaattggcccaacaggaatggcttcaaatgcagcaagctgcccaacaagcccagcttgctgctgcctcagccagtgcatctaatcaggcgggatcttctcaggatgaagaagatgatgatgatatctgaaattcaccagctgagtttctatttcttctataaatgtttttccctgcacaacaaaaacagtgaaagaaatgcttatctgtaattttgtatgcatcttggtggacttgtcattggtattctagggatgtctgctattaagtttcatctattgtgtgctatacatgtaaaaactgtctctttgaactattgaaaatttaaggttcagtataatatcaattttgaatttttaatggtgtttatgaaattttagatagcagcgagtccttcgtttgatcaataaacagtgttacagataacttcaagtttataaaaatacagtgaaatttctacaaagctctaaatctgcatttgcatttcctctgcccttttaa

SEQ ID NO: 277 - DNA, 99 bp, Homo sapiens
ttgaaaataaaagtacaagacatggatggtcagtattttggtctacagacaacttcaacttgtatcattaacattgatgatgtaaatgaccacttgcca

SEQ ID NO: 278 - DNA, 189 bp, Homo sapiens
ggacactgggcattatacttcaagacgtgaatgataacagcccattcatacctaaaaagacagtgatcatctgcaaacccaccatgtcatctgcggagattgttgcggttgatcctgatgagcctatccatggcccaccctttgactttagtctggagagttctacttcagaagtacagagaatgtgga

SEQ ID NO: 279 - DNA, 36 bp, Homo sapiens
gccatgacaatcgccaagtgaccacaactgaaatca

SEQ ID NO: 280 - DNA, 36 bp, Homo sapiens
ttctttttgtgttcacagatgaagcccggggcaaga

SEQ ID NO: 281 - DNA, 159 bp, Homo sapiens
caggtgtcgtgaaaactacccctaaaagccaaaatgggaaaggaaaagactcatatcaacattgtcgtcattggacacgtagattcgggcaagtccaccactactggccatctgatctataaatgcggtggcatcgacaaaagaaccattgaaaaattt

SEQ ID NO: 282 - DNA, 112 bp, Homo sapiens
aaacggccaaactgtggagagaacagtagcgcagtatttcagagaaaagtatactcttcagctgaagtacccgcaccttccctgtctgcaagtcgggcaggaacagaaacac

SEQ ID NO: 283 - DNA, 36 bp, Homo sapiens
cctttttcctctcttcagcgtggggcgcccacaatt

SEQ ID NO: 284 - DNA, 447 bp, Homo sapiens
gcgtggggcgcccacaatttgcgcgctctctttctgctgctccccagctctcggatacagccgacaccatgggtttcggagacctgaaaagccctgccggcctccaggtgctcaacgattacctggcggacaagagctacatcgaggggtatgtgccatcacaagcagatgtggcagtatttgaagccgtgtccagcccaccgcctgccgacttgtgtcatgccctacgttggtataatcacatcaagtcttacgaaaaggaaaaggccagcctgccaggagtgaagaaagctttgggcaaatatggtcctgccgatgtggaagacactacaggaagtggagctacagatagtaaagatgatgatgacattgacctctttggatctgatgatgaggaggaaagtgaagaagcaaagaggctaagggaagaacgtcttgcacaatatg

SEQ ID NO: 285 - DNA, 500 bp, Homo sapiens
agaagtgggaatgcaaaagtactttgacctttaaccttcggtccggcgcggtggagggaaacgcctccgtctctatataaggaattttccggtctcttcgggtcctttttcctctcttcagcgtggggcgcccacaatttgcgcgctctctttctgctgctccccagctctcggatacagccgacaccatgggtttcggagacctgaaaagccctgccggcctccaggtgctcaacgattacctggcggacaagagctacatcgaggggtatgtgccatcacaagcagatgtggcagtatttgaagccgtgtccagcccaccgcctgccgacttgtgtcatgccctacgttggtataatcacatcaagtcttacgaaaaggaaaaggccagcctgccaggagtgaagaaagctttgggcaaatatggtcctgccgatgtggaagacactacaggaagtggagctacagatagtaaagatgatgatgacattgacctcttt

SEQ ID NO: 286 - DNA, 500 bp, Homo sapiens
ggattctgctttaaatgttctggcgcgagcattggaaaataacaaagacaatccagaaatttggtgccattacctcagattgttctcaaaaagaggaaccaaggacgaggtgcaggaaatgtgtgaaacagctgttgaatatgctccagattatcaaagcttttggacttttctacacctagaaagtacctttgaagaaaaggattacgtatgtgagagaatgttggagtttctgatgggagcagccaagcaggaaacatccaatattttgtcctttcagcttttagaggctcttttgtttagagttcagctgcacatatttactggaagatgccaaagtgcactggcaattttacagaatgcattgaaatctgctaatgatggaatagtagctgaataccttaaaaccagtgatcgatgtttggcatggttggcctacatacatcttattgaattcaacattctcccttcaaaattttatgatccatctaatgataatc

SEQ ID NO: 287 - DNA, 62 bp, Homo sapiens
atggttatgaaggcattgatgctgtaaaagaagccctaagagcaggtttgaattgttctaca

SEQ ID NO: 288 - DNA, 80 bp, Homo sapiens
aatgctaaaagaaattcttcaggctggaaggaataatatcaaagggaaagctggaattgcaggatgaagtaggaacaaca

SEQ ID NO: 289 - DNA, 27 bp, Homo sapiens
gcgggagcttatgctgcttgccaggaa

SEQ ID NO: 290 - DNA, 36 bp, Homo sapiens
cggtgctcctggaggcaggtgatgctgtgggcacgc

SEQ ID NO: 291 - DNA, 36 bp, Homo sapiens
ttcacagtttctgctctggtaagaggtgttctaaaa

SEQ ID NO: 292 - DNA, 111 bp, Homo sapiens
gaaaagccaacagtgactgtgaacttccgaaagctgttgttgaatcgatgtcagaaggagtttgagaaagacaaagatgatgatgaggtttttgagaagaagcaaaaagag

SEQ ID NO: 293 - DNA, 25 bp, Homo sapiens
accagcatctgctgagctatgagcc

SEQ ID NO: 294 - DNA, 81 bp, Homo sapiens
gagagaaggagagcctgcagacagaggcctccagcttggtctgtctccccacctctaccagcatctgctgagctatgagcc

SEQ ID NO: 295 - DNA, 36 bp, Homo sapiens
tttgggtttgtttcctagctccaaatcttaacttgg

SEQ ID NO: 296 - DNA, 308 bp, Homo sapiens
tgtcaagtttcctggctgggagacaagcttttaccgacttcctctgcttgccagcaaagtcatctgctaactggatattggcagcttctctgctgtcttgcagctgcttccggagtgggttccacagggattcccgtgtgttcttggttcagcttgcagagggactttcacactccctggagaccgtttcctcccattctgtctggagttttcggcctaccccaagacaatgagatattcctgccctttcctcctatttccctccaacccccccttccgaaatacatttgctcaatcatttgcacttc

SEQ ID NO: 297 - DNA, 398 bp, Homo sapiens
gtgccaatgatgtatcctgcactctggacggctgcttggaggtcccatgggaacaggagggagcagctccaaatcttaacttggtgtcaagtttcctggctgggagacaagcttttaccgacttcctctgcttgccagcaaagtcatctgctaactggatattggcagcttctctgctgtcttgcagctgcttccggagtgggttccacagggattcccgtgtgttcttggttcagcttgcagagggactttcacactccctggagaccgtttcctcccattctgtctggagttttcggcctaccccaagacaatgagatattcctgccctttcctcctatttccctccaacccccccttccgaaatacatttgctcaatcatttgcacttcataggc

SEQ ID NO: 298 - DNA, 36 bp, Homo sapiens
agcaacagcagctccaaggacagttcgtgtggcaat

SEQ ID NO: 299 - DNA, 291 bp, Homo sapiens
ttttaccagtcttcagagaagagtcagctcttaccattgaagccaaatctatggtgctatttgaatcctggagacagcttttctttgttagttgacaaatacattttccgcattctctctataccctctgaagtggaaatgcaatgtaccttaagaaacagtcaagtgcttgatgaagataatatattgaatgaaacaccaaaatcccccgtgattaatttacctcatgagactactggtgcctcacaactggaaggaagcacagaaatagccaagacccagatgactccc

SEQ ID NO: 300 - DNA, 388 bp, Homo sapiens
tcttgaagtatgtgttccactccccaaaatattcattaagcgtcaggccccattaaaagtgtcccttcttcaggatctgaaggacttctttcaaaaagtttcacaggtatatgttgccattgatgaaagacttgcatctttgaaaactgatacatttagtaaaacaagagaggaaaaaatggaagatatttttgcacagaaagagatggaagaaggtgagttcaagaactggattgagaagatgcaagcaaggctcatgtcttcctctgtagatacccctcagcaactgcagtcggtctttgagtcactcattgccaagaaacaaagtctctgtgaagtgctgcaagcttggaataacaggttgcaggaccttttccaacaggaaaag

SEQ ID NO: 301 - DNA, 360 bp, Homo sapiens
tgccaacctgtatggttacatcaggtgtaaggtgcgcagcagaaagcatttaaccagcatggctacttcatattttggaaagcagtttttaagacaaaacactggagatgatcagacttcctgaatagagaaagcttatgtgctttgttacattggggaacaactgaagagattcttgactcaaccttttagagcttagtccatgttgcaacgaggagtgttggctttgtttttccacttaaaaactttatttataaaaaggaaaagtagttttcatattaagtttttatttcctttccagcagttggggctagaaagtatatgttggcactagaaacattgttaagatttgttctgtgg

SEQ ID NO: 302 - DNA, 280 bp, Homo sapiens
gaggagccgggaggctggaccagtcccgtcgtgcagtcaggtgggcggtgtgtctttccagaaggtcacgtggaaatgtctcgggacttgggtcccggagtgcccgtgaagcgtgtttttgctcctgaggtgcattttctcatcatccttgctttaccacaatgagcaatgaggtcgggttttatatgcaacttattgtatctgaattcctgtagcacacctcataggtatgatttttttaaattaaagaattcagaataaacattttttgatccacttg

SEQ ID NO: 303 - DNA, 36 bp, Homo sapiens
atatatagaagacgatacgcagaagggaaaaaagcc

SEQ ID NO: 304 - DNA, 36 bp, Homo sapiens
atccccacaggagaaggacctcccctggtgaagaca

SEQ ID NO: 305 - DNA, 500 bp, Homo sapiens
gctaggaaaaaagctgaaggcaactatggatgctgggaaactggtgagtgatgaaatggtagtggagctcattgagaagaatttggagacccccttgtgcaaaaatggttttcttctggatggcttccctcggactgtgaggcaggcagaaatgctcgatgacctcatggagaagaggaaagagaagcttgattctgtgattgaattcagcatcccagactctctgctgatccgaagaatcacaggaaggctgattcaccccaagagtggccgttcctaccacgaggagttcaaccctccaaaagagcccatgaaagatgacatcaccggggaacccttgatccgtcgatcagatgataatgaaaaggccttgaaaatccgcctgcaagcctaccacactcaaaccaccccactcatagagtactacaggaaacgggggatccactccgccatcgatgcatcccagacccccgatgtcgtgttcgcaagcatcctagcag

SEQ ID NO: 306 - DNA, 500 bp, Homo sapiens
aagaggaaagagaagcttgattctgtgattgaattcagcatcccagactctctgctgatccgaagaatcacaggaaggctgattcaccccaagagtggccgttcctaccacgaggagttcaaccctccaaaagagcccatgaaagatgacatcaccggggaacccttgatccgtcgatcagatgataatgaaaaggccttgaaaatccgcctgcaagcctaccacactcaaaccaccccactcatagagtactacaggaaacgggggatccactccgccatcgatgcatcccagacccccgatgtcgtgttcgcaagcatcctagcagccttctccaaagccacatcctagtatcagaaggccaggcgagactgcaacactgctcatcaccccgcggcgtgatccctgctcttaggtgctgggcagaggggaagggtggtcagggtgaggatggtgagggagggctggtgaggggctcagaggaatacttggaacaacag

SEQ ID NO: 307 - DNA, 37 bp, Homo sapiens
tggccgttcctaccacgaggagttcaaccctccaaaa

SEQ ID NO: 308 - DNA, 160 bp, Homo sapiens
atccgtcgatcagatgataatgaaaaggccttgaaaatccgcctgcaagcctaccacactcaaaccaccccactcatagagtactacaggaaacgggggatccactccgccatcgatgcatcccagacccccgatgtcgtgttcgcaagcatcctagcag

SEQ ID NO: 309 - DNA, 36 bp, Homo sapiens
aagaggtgattggtgcaggtgagagccgaaggctgc

SEQ ID NO: 310 - DNA, 323 bp, Homo sapiens
gcggcgttgtagttaagctcgtgtaacggcggcggtgtcggcagctgctgtagcgaagagagtttggcgcgatgtctcacaccattttgctggtacagcctaccaagaggccagaaggcagaacttatgctgactacgaatctgtgaatgaatgcatggaaggtgtttgtaaaatgtatgaagaacatctgaaaagaatgaatcccaacagtccctctatcacatatgacatcagtcagttgtttgatttcatcgatgatctggcagacctcagctgcctggtttaccgagctgatacccagacataccagccttataacaaa

SEQ ID NO: 311 - DNA, 64 bp, Homo sapiens
gtggcacaagatctctgtaaagtagcaggcatagcaaaagttctggtggctcagcatgatgtgt

SEQ ID NO: 312 - DNA, 500 bp, Homo sapiens
gtaacagaagacagatttggaattttaacagagaaatacagaattcctgtgccaattcttccagggcttccaatgaataatcatggcaattacattgtacgcttgggacatttagtgagctggatgggcgaacaagcagaagcccttggtgttgaagtataccctggttatgcagctgctgaggtcctttttcatgatgatggtagtgtaaaaggaattgccactaacgatgtagggatacaaaaggatggtgcaccaaaggcaacatttgagagaggactggaactacatgctaaagtcacaatttttgcagaaggttgccatggacatctagccaagcaactatataagaagtttgatttgagagcaaattgtgaacctcaaacctacgggattggactgaaggagttatgggttattgatgaaaagaactggaaacctgggagagtagatcacactgttggttggcccttggacagacatacctatggaggatcttt

SEQ ID NO: 313 - DNA, 36 bp, Homo sapiens
atattgctatcccaacagattgccaagcatgcccac

SEQ ID NO: 314 - DNA, 36 bp, Homo sapiens
gaccaagcattttgtaagattgccaagcatgcccac

SEQ ID NO: 315 - DNA, 103 bp, Homo sapiens
actgcagatttactttaaggctcatattctccaagtctattctgctttaaaaagaagacaagaaaagaagtggtttatcaaaatcacgttataatcagatttt

SEQ ID NO: 316 - DNA, 374 bp, Homo sapiens
ggacatggaacacacaggacattacctacatcttgcctttctgatgacaacagttttttctttgtctcctggaacaaaagcaaactatacccgtctgtgggctaacagtacttcttcctgggattcagttattcaaaacaagacaggcagaaaccaaaatgaaaacattaacacaaaccctataactcctgaagtagattataaaggtaattctacaaacatgcctgaaacatctcacatcgtagctttaacttctaaatctgaacaggagctttatataccttctgtcgtcagcaacagtccttcaacagtacagagcattgaaaacacaagcaaaagtcatggtgaaattttcaaaaaggatgtctgtgcgg

SEQ ID NO: 317 - DNA, 195 bp, Homo sapiens
ggacatggaacacacaggacattacctacatcttgcctttctgatgacaacagttttttctttgtctcctggaacaaaagcaaactatacccgtctgtgggctaacagtacttcttcctgggattcagttattcaaaacaagacaggcagaaaccaaaatgaaaacattaacacaaaccctataactcctgaagt

SEQ ID NO: 318 - DNA, 500 bp, Homo sapiens
ccagtatttattgccttcagatcctctacaaagaaaagtgtgcagtacgacgatgtaccagaatacaaagacagattgaacctctcagaaaactacactttgtctatcagtaatgcaaggatcagtgatgaaaagagatttgtgtgcatgctagtaactgaggacaacgtgtttgaggcacctacaatagtcaaggtgttcaagcaaccatctaaacctgaaattgtaagcaaagcactgtttctcgaaacagagcagctaaaaaagttgggtgactgcatttcagaagacagttatccagatggcaatatcacatggtacaggaatggaaaagtgctacatccccttgaaggagcggtggtcataatttttaaaaaggaaatggacccagtgactcagctctataccatgacttccaccctggagtacaagacaaccaaggctgacatacaaatgccattcacctgctcggtgacatattatggaccatctggccagaa

SEQ ID NO: 319 - DNA, 500 bp, Homo sapiens
atgaggcagacgagataagtgatgaaaacagagaaaaggtgaatgaccaggcaaaactaattgtgggaatcgttgttggtctcctccttgctgcccttgttgctggtgtcgtctactggctgtacatgaagaagtcaaagactgcatcaaaacatgtaaacaaggacctcggtaatatggaagaaaacaaaaagttagaagaaaacaatcacaaaactgaagcctaagagagaaactgtcctagttgtccagagataaaaatcatatagaccaattgaagcatgaacgtggattgtatttaagacataaacaaagacattgacagcaattcatggttcaagtattaagcagttcattctaccaagctgtcacaggttttcagagaattatctcaagtaaaacaaatgaaatttaattacaaacaataagaacaagttttggcagccatgataataggtcatatgttgtgtttggttcaattttttttccgtaaatgtctg

SEQ ID NO: 320 - DNA, 262 bp, Homo sapiens
cagcggttcagctgaggtagggacgtgccgtaggccggaatgttaccggctgttggatctgtggatgaggaagaggatcctgcggaggaggattgtcctgaattggttcccattgagacgacgcaaagcgaggaggaggaaaagtctggcctcggcgccaagatcccagtcacaattatcaccgggtatttaggtgctgggaagacaacacttctgaactatattttgacagagcaacatagtaaaagagtagcggtcattt

SEQ ID NO: 321 - DNA, 36 bp, Homo sapiens
tgggttcatatttttcaggctggctactactgcagg

SEQ ID NO: 322 - DNA, 36 bp, Homo sapiens
tggagcttcaagtgcttggcctccagttaccaactc

SEQ ID NO: 323 - DNA, 516 bp, Homo sapiens
gctggctactactgcaggtctccagcagagtcttcacggaaggagaacctctggccttgaggtgtcatgcgtggaaggataagctggtgtacaatgtgctttactatcgaaatggcaaagcctttaagtttttccactggaattctaacctcaccattctgaaaaccaacataagtcacaatggcacctaccattgctcaggcatgggaaagcatcgctacacatcagcaggaatatccactgtgaaagagctatttccagctccagtgctgaatgcatctgtgacatccccactcctggaggggaatctggtcaccctgagctgtgaaacaaagttgctcttgcagaggcctggtttgcagctttacttctccttctacatgggcagcaagaccctgcgaggcaggaacacatcctctgaataccaaatactaactgctagaagagaagactctgggttatactggtgcgaggctgccacagaggatggaaatgtccttaagcgcagccctgagt

SEQ ID NO: 324 - DNA, 36 bp, Homo sapiens
attttattgtcattgcaggtgaatcaaacatccctt

SEQ ID NO: 325 - DNA, 279 bp, Homo sapiens
gtatgttgaagaaagtacgcacatcttatcttctgaacattttgatggaattaaccacaaacttcatgcaagaacagtaaaaggaaagatactattcaagtccagtacatcataatgcagaattctgtatcagtaccaccaaaagatgaaggtgaatcaaacatcccttctggaacaatacagagtaggaaaggtttgcagaataagagtcagtttaggaccattgcaccaaaaattgtgcccaaagtcctaacgtccagaatgctgccatgtcattca

SEQ ID NO: 326 - DNA, 253 bp, Homo sapiens
gcacatcttatcttctgaacattttgatggaattaaccacaaacttcatgcaagaacagtaaaaggaaagatactattcaagtccagtacatcataatgcagaattctgtatcagtaccaccaaaagatgaaggtgaatcaaacatcccttctggaacaatacagagtaggaaaggtttgcagaataagagtcagtttaggaccattgcaccaaaaattgtgcccaaagtcctaacgtccagaatgctgccat

SEQ ID NO: 327 - DNA, 131 bp, Homo sapiens
ggaggaacagatgttctgtcattgccacattcttctggacacagactggagaactataggaatgtatgttgaagaaagtacgcacatcttatcttctgaacattttgatggaattaaccacaaacttcatg

SEQ ID NO: 328 - DNA, 500 bp, Homo sapiens
ggaggaacagatgttctgtcattgccacattcttctggacacagactggagaactataggaatgtatgttgaagaaagtacgcacatcttatcttctgaacattttgatggaattaaccacaaacttcatgcaagaacagtaaaaggaaagatactattcaagtccagtacatcataatgcagaattctgtatcagtaccaccaaaagatgaaggtgaatcaaacatcccttctggaacaatacagagtaggaaaggtttgcagaataagagtcagtttaggaccattgcaccaaaaattgtgcccaaagtcctaacgtccagaatgctgccatgtcattcaccatcacgctctgatcaggtgaatctgggaccctccatcaactccaagctgctggggatgtccacccagaactatgccctgatgcaggttgctggccaggaggggacattttctcttgttgctctgccacatgttgcctcagctcagccaattcagaa

SEQ ID NO: 329 - DNA, 281 bp, Homo sapiens
aattaattaaaaggatttacggtatatcttatgactctacaggagccttgggatatagataaaaatgaatgccatttcccatccagtactgaagtgttaaagttagaagacatttgctaagtcaaatcacttcaggaagctcatcctgggagtggaggaacagatgttctgtcattgccacattcttctggacacagactggagaactataggaatgtatgttgaagaaagtacgcacatcttatcttctgaacattttgatggaattaaccacaaacttc

SEQ ID NO: 330 - DNA, 310 bp, Homo sapiens
catctgtaatttggaagccaagtcagtaacaaaatgaaaccagtaaagcatctgttgaccaccagtaacaaatcggcaaatgttccagcattaactactaaaaaaggactacataatttaccattatcacctgagctaaaggaaaaacataatgcaaaattaattcatgataaaattgaaccaatggtcctaagatctccaccaacaggagaatccattttacggtatgctttgcccattccatcgagtaagacaaagaacttactaccagaagatgaaatgatcggaaaaattatcaaacatctgaaga

SEQ ID NO: 331 - DNA, 498 bp, Homo sapiens
gaaacctatggacattgcgatcagaatggagaagaaccatttgtaaagcatgaacatgaagaattatctttatctgttggggatgatatgaattcattcttgacatattgttcgcaatttgcagctcagctagaagaagcacttaaagaagaacaaaatattttggaatctcttttaagtggtttcagtggcaggtcaatcagatggaagaaataagtaaagatcaaactcttttacaagcagagcctccaaaacctgacaaaacagtcattttaaatattgcagaaatagtaaggcttgtacaaagatttgaagaactgaagaatcgccttaaacagaggtctaaatcctccgtgaaagtcatgttgtctaaaactatggataaagaaaatcgaccagaagcagtgaaaagttgtgaagctctggcacagaaaattgaagaattcttagaagcccactcaactgatgaatttaaagatgtttctgcaacagaaccac

SEQ ID NO: 332 - DNA, 500 bp, Homo sapiens
atcgaaggcaaatcatcctttccctacgtcccctgccaacccctgccgctctcctctattttgtacactttatcattaaaggatttgaaatgaatggaggaataagtttttttcatctgtaatttggaagccaagtcagtaacaaaatgaaaccagtaaagcatctgttgaccaccagtaacaaatcggcaaatgttccagcattaactactaaaaaaggactacataatttaccattatcacctgagctaaaggaaaaacataatgcaaaattaattcatgataaaattgaaccaatggtcctaagatctccaccaacaggagaatccattttacggtatgctttgcccattccatcgagtaagacaaagaacttactaccagaagatgaaatgatcggaaaaattatcaaacatctgaagatggttgtttccactttggaagaaacctatggacattgcgatcagaatggagaagaaccatttgtaaagcatgaacat

SEQ ID NO: 333 - DNA, 493 bp, Homo sapiens
agagtttaaaataaaagaagatttggatcaagtacagaaagtagcacgtctggaaattgagaacaaagtccttcaggagcaattgaaacaggctttacaggaagctgaaaaagctaagcatcaacttaactatttcctaaatcaagagaagttacttaaaagtgaggggaaaactgagacaacaatgcaagtgggtaatagtcaaacaaaagttaaaggtgaagattcaaaaaatataccattggagaaagaaacaagaaaatcactggtttcagattcaggtggacaaaggacaagtgataaaatccaagaatatccacagatcactgcccaaagcggaagactgattgaaaagagatgctaatagagtttctgaaatactttggaaaagtctcccaaaccttcagagagtggatgggagcgaagtaaggagaccccacctgagcagatacatggtattgcttacaataaagtacatttttgctctttacaa

SEQ ID NO: 334 - DNA, 498 bp, Homo sapiens
gaatacaaacagatgcagtgtgattttcagttgttatcagaagagaagttggtgctggaaaatgaactacaaaagttgaaggacaaagagaaaactaagcctacaaataatcgaacaaagaaagctgtgaaaacagtgaagaaaaaagacaaaggaaaatctgaggattcagaaaagaagatgtctccagaaaaagagtttaaaataaaagaagatttggatcaagtacagaaagtagcacgtctggaaattgagaacaaagtccttcaggagcaattgaaacaggctttacaggaagctgaaaaagctaagcatcaacttaactatttcctaaatcaagagaagttacttaaaagtgaggggaaaactgagacaacaatgcaagtgggtaatagtcaaacaaaagttaaaggtgaagattcaaaaaatataccattggagaaagaaacaagaaaatcactggtttcagattcaggtggacaaaggacaagtgataaa

SEQ ID NO: 335 - DNA, 500 bp, Homo sapiens
gtggatgacctcccggattggtgtgagataacttttttgcttgaaagagactgctctatttattctgtgacatgaacattttttcctagtacctttggctgctaaggcagcagcatgtttaatttataacaacacaaacctctgagagcaacacttgaatcaagtgcagctgaactggaacataaaagattttttcttaactttttttttttaacacactaatcttcagttggatgaatgtaatgtataactatgttttcagcaacaattcttctgtttattctaattaatcagtgactgccttgtaagaaatgtttgtcatatgcgtgatgtcttctgaaatattcttataaccttaatgaccaattgctttcaattcttgaccagcactccctcccaaccagagaattactggtttgatagagtagtcttggaaaccatcaggtactgcctgcagacttctccagcactaaatatatttgttccctctataaaccatt

SEQ ID NO: 336 - DNA, 36 bp, Homo sapiens
aagttgtcagcaggagagagcattagtttggatgaa

SEQ ID NO: 337 - DNA, 500 bp, Homo sapiens
ttaaaatgcagctatagacaattaataaaagaaatgaattctgccaaagagaaatataaagaagctttagctaaagggaaggaaactgaaaaggccaaggaacgatacgacaaagccacaatgaaacttcatatgttgcacaatcagtatgtattggcgttgaaaggggcacagctccatcagaatcagtattatgatatcacacttcccctgcttctggactccttacaaaagatgcaagaagaaatgataaaagcactcaaaggtatatttgatgaatacagccagataaccagtcttgtcacagaggaaatagtgaatgtccataaagagattcaaatgtcggttgaacagatagatcctagtacagaatacaataatttcatagatgttcacagaacaacggctgctaaagaacaagaaatagagtttgatacttccttactggaagaaaatgaaaatcttcaggcaaatgagatcatgtggaataacttaacagc

SEQ ID NO: 338 - DNA, 26 bp, Homo sapiens
gaatcaaggagcttggcactcttatt

SEQ ID NO: 339 - DNA, 40 bp, Homo sapiens
ataatattaattaccgaatcaaggagcttggcactcttat

SEQ ID NO: 340 - DNA, 58 bp, Homo sapiens
taattcactggtccacaagcggtctcctttacgtcgaaaccaaaagaccccaacatcc

SEQ ID NO: 341 - DNA, 192 bp, Homo sapiens
ggtgagaacaaggagaagaaattacttatgtttaaaagagttcaggaagcagaggataaatggaggggtgcgcaagccctaattgagcaaattaaagccacattctcagaaaaggagaaagaactagaaaataagttggaagaactaaagaaacaacaggaaaaagaactcttcaaattgaatcaagataat

SEQ ID NO: 342 - DNA, 252 bp, Homo sapiens
agatgctgtgctgtctcgttaggatgaatggattaaaatgtacttttcctcctctgcttctggagagggagagaggaatattccagaagccactgtgttccttctgctttctgtgtggcatgatgccttcttctgtagagtgggcgctttgcagaatacgtgttgaatgaaatcactgatctaggaaaagtaaaaattcctcaaatgaatacagaatacttgtgctactgctgatgatcaacactttataca

SEQ ID NO: 343 - DNA, 197 bp, Homo sapiens
gaagctcagttgagaattgattcagcaaacatgaatgatgatattaccactagtctccgtggactgaataaactagccaaaattctgaagaaaagaaggattgaaaaaggggctttgactctatcctctcctgaagttcgattccacatggacagtgaaactcacgatcctatagatctgcagaccaaggaacttag

SEQ ID NO: 344 - DNA, 197 bp, Homo sapiens
gcatctctgacatatgctgaagctcagttgagaattgattcagcaaacatgaatgatgatattaccactagtctccgtggactgaataaactagccaaaattctgaagaaaagaaggattgaaaaaggggctttgactctatcctctcctgaagttcgattccacatggacagtgaaactcacgatcctatagatct

SEQ ID NO: 345 - DNA, 521 bp, Homo sapiens
acgagacgaagacggaaccggagccggttgcgggcagtggacgcggttctgccgagagccgaagatggcagtgaacgtatactcaacgtcagtgaccagtgataacctaagtcgacatgacatgctggcctggatcaatgagtctctgcagttgaatctgacaaagatcgaacagttgtgctcaggggctgcgtattgtcagtttatggacatgctgttccctggctccattgccttgaagaaagtgaaattccaagctaagctagaacacgagtacatccagaacttcaaaatactacaagcaggttttaagagaatgggtgttgacaaaataattcctgtggacaaattagtaaaaggaaagtttcaggacaattttgaattcgttcagtggttcaagaagtttttcgatgcaaactatgatggaaaagactatgaccctgtggctgccagacaaggtcaagaaactgcagtggctccttcccttgttgctccagctctgaataaaccgaagaaacctc

SEQ ID NO: 346 - DNA, 41 bp, Homo sapiens
ctgaataacaaggaagcaggaatgtatcattgcgtgtgctg

SEQ ID NO: 347 - DNA, 410 bp, Homo sapiens
gagaggcgcacccgggcggccagctgggctcggagcggaacggggtcaggatggacgaggacgtgctaaccaccctgaagatcctcatcatcggcgagagtggggtgggcaagtccagcctgctcttgaggttcacagatgatacgtttgatccagaacttgcagcaacaataggtgttgactttaaggtgaaaacaatttcagtggatggaaataaggctaaacttgcaatatgggatactgctggtcaagagaggtttagaacattaactcccagctattatagaggtgcacagggtgttatattagtttatgatgtcacaagaagagatacatttgttaaactggataattggttaaatgaattggaaacatactgtacaagaaatgacatagtaaacatgctagtt

SEQ ID NO: 348 - DNA, 500 bp, Homo sapiens
gaattaagcagagaaaatgatgaagagaaagtcacgtttaatttgagtaaaggagcatgtagctcatccggagcaacatcttccaagtcaagtactctgggaccgagtgcactgaagacgataggaagttcagcatcagtgaaacgaaaagaatcttcccagagctcaactcagtctaaagaaaagaagaaaaagaaatctgcactggatgaaatcatggagattgaagaggaaaagaaaagaactgcccgaacagactactggctacagcctgaaattattgtgaaaattataaccaagaaactgggagagaaatatcataagaaaaaggctattgttaaggaagtaattgacaaatatacagctgttgtgaagatgattgattctggagacaagctgaaacttgaccagactcatttagagacagtaattccagcaccaggaaaaagaattctagttttaaatggaggctacagaggaaatgaaggtaccctagaatc

SEQ ID NO: 349 - DNA, 500 bp, Homo sapiens
aatgctcatcagcgatggctgggagaactaccagagctggcagagtatcaagcacttgtgaaggcagaacagaaaaagtgggaagaacagcatgaggtctctgtgaacaaaaggatatcatttgctgtttctgaagctaaagagaaatggaagagtgagcttgaaaatatgaggaaaaatatacttcctggaaaggaattggaagagaagattcattctcttcagaaggaacttgagttaaagaacgaagaagtccctgtggtcatcagggctgagttagctaaggctcggagtgaatggaacaaagaaaagcaagaagaaatccacagaatccaagaacaaaatgagcaagattaccggcaatttttagatgatcaccgaaataaaattaatgaggtgcttgcggcagctaaagaagactttatgaaacaaaaaactgaactacttcttcagaaggagacagaattacaaacttgtctagaccagagtcgtagagaatg

SEQ ID NO: 350 - DNA, 500 bp, Homo sapiens
gaagctaaagagaaatggaagagtgagcttgaaaatatgaggaaaaatatacttcctggaaaggaattggaagagaagattcattctcttcagaaggaacttgagttaaagaacgaagaagtccctgtggtcatcagggctgagttagctaaggctcggagtgaatggaacaaagaaaagcaagaagaaatccacagaatccaagaacaaaatgagcaagattaccggcaatttttagatgatcaccgaaataaaattaatgaggtgcttgcggcagctaaagaagactttatgaaacaaaaaactgaactacttcttcagaaggagacagaattacaaacttgtctagaccagagtcgtagagaatggactatgcaggaagccaagcggatccaactggaaatctatcagtatgaggaagacatcctgactgtacttggggttcttttaagtgatacccaaaaggagcacatcagtgattctgaggacaagcagctttt

SEQ ID NO: 351 - DNA, 500 bp, Homo sapiens
ggaaaggaattggaagagaagattcattctcttcagaaggaacttgagttaaagaacgaagaagtccctgtggtcatcagggctgagttagctaaggctcggagtgaatggaacaaagaaaagcaagaagaaatccacagaatccaagaacaaaatgagcaagattaccggcaatttttagatgatcaccgaaataaaattaatgaggtgcttgcggcagctaaagaagactttatgaaacaaaaaactgaactacttcttcagaaggagacagaattacaaacttgtctagaccagagtcgtagagaatggactatgcaggaagccaagcggatccaactggaaatctatcagtatgaggaagacatcctgactgtacttggggttcttttaagtgatacccaaaaggagcacatcagtgattctgaggacaagcagcttttggaaatcatgtcgacttgttcttcaaaatggatgtctgtgcaatattttgaaaaact

SEQ ID NO: 352 - DNA, 500 bp, Homo sapiens
ccaaattgtaaagaccatcgatgttaggaagaaactgcctcaactaatgagcaaaataaccagctaacatcgtaatgacaggatcaaattcacacataacgatattaaccttaaaggtgttacctcattttgaaagtcttgggaaacaggaaaaaattcctaacaaaatgtcagcttttcgaaatcattgtccacatttggattcagttggtgaaataacaaaagaagatttgatacaaaaatcccttggtacttgtcaggattgtaaagtccaaggaccaaatctttgggcatgtctggagaatagatgttcatatgttggctgtggtgaatcacaagtagatcacagcaccatacattctcaggagacaaagcattatctaactgtgaaccttaccactcttcgagtatggtgttatgcttgcagcaaagaagtatttttggataggaaattaggaactcagccttcattgcctcatgtaagacaacctcaccaaata

SEQ ID NO: 353 - DNA, 36 bp, Homo sapiens
gtccaggctttagtgcagctattccttgagcgagag

SEQ ID NO: 354 - DNA, 36 bp, Homo sapiens
tttgtaatcgtccagttggttccgatcagaaagctg

SEQ ID NO: 355 - DNA, 36 bp, Homo sapiens
acacatcccatctgtttgtccctggataaagtaata

SEQ ID NO: 356 - DNA, 500 bp, Homo sapiens
caaatgctcctgatgtaaatgatgcaattgtgaaactattcaatgattttgatgttaaggaaacctcccatcatttagtgatttctcatctagatctacacatatgtgatgacattcatgctaaagaaaaagagtcaaacagacgtattactggaggggcaatgcaactctcttttacacagctaactatagattattatccttatcataaagcaggagatagttgtaatcattggatgtattttagtgatgcaaccaaaacaaaaaatggatgggccaatgagttattgcatgaatttgagtgcaacgttgaaatgcttaaacaggctgtgaaggatcataatgtaggttcacctcctaaatccccaacacatgcctctccccagcacacacaaacagagaaggactaccctctgaaagggacatgcagaacaccttcagtattatctcaacaatcaaaagctaagctaatgtctagttctgttgtggttagacttgca

SEQ ID NO: 357 - DNA, 36 bp, Homo sapiens
gactcggaaatagcaaaggtgatcgaggaaacatct

SEQ ID NO: 358 - DNA, 36 bp, Homo sapiens
attttcttttccccccaggaatgctgtctctgcaat

SEQ ID NO: 359 - DNA, 309 bp, Homo sapiens
atggcgactccgagcaagaagacgtcaactccaagcccccagccttccaagagagctctcccgagagacccttcgtcggaggtcccgagcaagaggaagaattcggccccgcagctgccgctgttgcagtcgtccgggcctttcgtggaaggctctatcgtccgcatctcgatggagaacttcctaacatatgatatttgtgaagtatctcctggaccccacttgaatatgatcgttggagccaatggaacagggaagtcgagcattgtgtgtgccatttgccttggtttagctggaaaacctgctttc

SEQ ID NO: 360 - DNA, 500 bp, Homo sapiens
agaggatgttctagaggcatggttgaaattgaattgttcagggcttctggaaatcttgtaatcacccgtgagattgatgtggcaaaaaatcagtccttttggttcatcaacaaaaaatctacaacccagaaaatagtggaagagaaagttgcagccttaaatattcaagtggggaatctttgccagtttctccctcaggacaaagttggagaatttgctaaactcagcaaaattgaactcctcgaagccactgaaaagtcaattggtcccccagaaatgcacaaatatcactgtgaactcaaaaacttaagggagaaagaaaaacagctcgagacctcatgcaaagagaaaactgagtatctacagaaaatggttcagaggaatgaaagatataaacaagatgtggagaggttctatgaacggaagcgacatttagatttaattgagatgcttgaagcaaaaaggccatgggtggaatatgaaaatgttcgtcaggaata

SEQ ID NO: 361 - DNA, 500 bp, Homo sapiens
tcttgtaatcacccgtgagattgatgtggcaaaaaatcagtccttttggttcatcaacaaaaaatctacaacccagaaaatagtggaagagaaagttgcagccttaaatattcaagtggggaatctttgccagtttctccctcaggacaaagttggagaatttgctaaactcagcaaaattgaactcctcgaagccactgaaaagtcaattggtcccccagaaatgcacaaatatcactgtgaactcaaaaacttaagggagaaagaaaaacagctcgagacctcatgcaaagagaaaactgagtatctacagaaaatggttcagaggaatgaaagatataaacaagatgtggagaggttctatgaacggaagcgacatttagatttaattgagatgcttgaagcaaaaaggccatgggtggaatatgaaaatgttcgtcaggaatatgaagaagtaaaactagttcgtgaccgagtgaaggaagaggtcagaaaactta

SEQ ID NO: 362 - DNA, 500 bp, Homo sapiens
ctacaggaagcataaatttgtctttagatgacctttcaaatgtttcttctgatgactcagtacaacttcatgcctacatttcagacacaggcgtttgtaatgatcatggcaagacatatgcattatatgccatcactgtacaccggcgcaacctaaacagtgaggagatgtggaaaacctatcgtcgttatagtgacttccatgacttccacatgagaatcactgaacagtttgaaagtctctcaagcatattgaaacttcctggaaaaaagacttttaataatatggatagagattttttagaaaagagaaaaaaggatctaaatgcatatttgcagttactgttagctcctgaaatgatgaaggcatcccccgctttagctcactatgtgtatgatttccttgagaacaaagcctacagtaaaggaaaaggggattttgctcgcaagatggacacttttgtaaatccacttcgcaattcaatgaggaatgtttcaaat

SEQ ID NO: 363 - DNA, 26 bp, Homo sapiens
ttaatgggtctcctacaggaagcata

SEQ ID NO: 364 - DNA, 104 bp, Homo sapiens
gcaagacatatgcattatatgccatcactgtacaccggcgcaacctaaacagtgaggagatgtggaaaacctatcgtcgttatagtgacttccatgacttccac

SEQ ID NO: 365 - DNA, 75 bp, Homo sapiens
atgatgaaggcatcccccgctttagctcactatgtgtatgatttccttgagaacaaagcctacagtaaaggaaaa

SEQ ID NO: 366 - DNA, 36 bp, Homo sapiens
aagactgattcagaccctgaacatcgccgagtttcg

SEQ ID NO: 367 - DNA, 500 bp, Homo sapiens
agatgtggaaaacctatcgtcgttatagtgacttccatgacttccacatgagaatcactgaacagtttgaaagtctctcaagcatattgaaacttcctggaaaaaagacttttaataatatggatagagattttttagaaaagagaaaaaaggatctaaatgcatatttgcagttactgttagctcctgaaatgatgaaggcatcccccgctttagctcactatgtgtatgatttccttgagaacaaagcctacagtaaaggaaaaggggattttgctcgcaagatggacacttttgtaaatccacttcgcaattcaatgaggaatgtttcaaatgcagttaaatcccttcctgatagcttggcagagggaatgactaaaatgtcagacaacatgggcaaaatgtcagaaagattaggtcaagacataaagcaatcattttttaaggtgcctcctttaattcctaagactgattcagaccctgaacatcgccgagtttcg

SEQ ID NO: 368 - DNA, 500 bp, Homo sapiens
aaaaaggatctaaatgcatatttgcagttactgttagctcctgaaatgatgaaggcatcccccgctttagctcactatgtgtatgatttccttgagaacaaagcctacagtaaaggaaaaggggattttgctcgcaagatggacacttttgtaaatccacttcgcaattcaatgaggaatgtttcaaatgcagttaaatcccttcctgatagcttggcagagggaatgactaaaatgtcagacaacatgggcaaaatgtcagaaagattaggtcaagacataaagcaatcattttttaaggtgcctcctttaattcctaagactgattcagaccctgaacatcgccgagtttcggctcaacttgacgataatgtggatgacaatattccacttagggtaatgctgcttctcatggatgaagtattcgacttaaaagaaagaaatcagtggttgcgaaggaatatcaaaaacctacttcaacagcttattagagctacata

SEQ ID NO: 369 - DNA, 272 bp, Homo sapiens
taaaagaaaaaccagaagaagcaggtcatgaagctgaggaaagaggagagaccgagaccgaccagaacgaaagtcagagtccacaggagcctgaggaaggccccagtgaagatgacaaggcagaaggggaagaggaaatggacacaggagctgatgaccaagatggagatgctgctcagcatcctgaagaacactctgaggagcagcagcagtctgtggaggaaaaagacaaggaagccgatgaagaaggtggagagaatggccctgctgac

SEQ ID NO: 370 - DNA, 36 bp, Homo sapiens
tccaacccacatcagcagatcatggagtgcatcgga

SEQ ID NO: 371 - DNA, 500 bp, Homo sapiens
gataaaactggtacactgacagaaaatgagatgcagtttcgggaatgttcaattaatggcatgaaataccaagaaattaatggtagacttgtacccgaaggaccaacaccagactcttcagaaggaaacttatcttatcttagtagtttatcccatcttaacaacttatcccatcttacaaccagttcctctttcagaaccagtcctgaaaatgaaactgaactaattaaagaacatgatctcttctttaaagcagtcagtctctgtcacactgtacagattagcaatgttcaaactgactgcactggtgatggtccctggcaatccaacctggcaccatcgcagttggagtactatgcatcttcaccagatgaaaaggctctagtagaagctgctgcaaggattggtattgtgtttattggcaattctgaagaaactatggaggttaaaactcttggaaaactggaacggtacaaactgcttcatattctggaatttga

SEQ ID NO: 372 - DNA, 500 bp, Homo sapiens
catgaaaaactatttatggaagtttgcagaaattgttcagctgtattatgctgtcgtatggctccactgcagaaagcaaaagtaataagactaataaaaatatcacctgagaaacctataacattggctgttggtgatggtgctaatgacgtaagcatgatacaagaagcccatgttggcataggaatcatgggtaaagaaggaagacaggctgcaagaaacagtgactatgcaatagccagatttaagttcctctccaaattgctttttgttcatggtcatttttattatattagaatagctacccttgtacagtattttttttataagaatgtgtgctttatcacaccccagtttttatatcagttctactgtttgttttctcagcaaacattgtatgacagcgtgtacctgactttatacaatatttgttttacttccctacctattctgatatatagtcttttggaacagcatgtagaccctcatgtgttacaaaa

SEQ ID NO: 373 - DNA, 36 bp, Homo sapiens
ctccagttccagcctcacccttagctccagtttcag

SEQ ID NO: 374 - DNA, 500 bp, Homo sapiens
tgaaaagttaatgcatgactttgcaagtgaaagccaacagtagattttagtcttaaaatttacaaactacgtacagctgtttcagtattttgaatacaaagaaaaccttttgtattggtaacttttaataggaattttaatgaatctggtttttttatagggtgttcttagttctgcactggatttgctagatttgttggaagcctttgtaccttatgtatcctcgtcattggtggtacttacttaaccaattaaaccatttctgttgtggggttattaaaccactggtagcttttataccagatatataatccttatatccaattacacatgaagaaggaaaagcaaaactcaggaacactgctattgtgaattactcttggattcttgtgctttgcctttgaaaatgcttaaatggccatgaccctcttcctgctttattctagtgtagtctttataaaacttgtgggatttgataagcagttcacatgcaaaccagt

SEQ ID NO: 375 - DNA, 66 bp, Homo sapiens
ccatcactggtgcaagctatatttaacggagatcctgatgaagttcgagcactaatatttaagaaa

SEQ ID NO: 376 - DNA, 500 bp, Homo sapiens
tctagaggtgccaatattaatgcttttgacaagaaagataggcgtgctatccattgggcagcatatatgggtcacattgaagtagtgaaattgcttgtgtcgcatggagctgaagtgacatgcaaggataaaaagtcttatacacctcttcatgcagcagcctctagtggaatgatcagcgtagtcaagtaccttctagatcttggagttgatatgaatgaaccaaatgcctatggaaatacacctcttcatgtagcctgctataatggacaagatgttgtagtgaatgaacttatagactgtggtgctattgtgaatcaaaagaatgaaaaaggatttactcctttgcactttgctgctgcatcaacacatggagcattgtgtttagagcttctagttggcaatggggccgatgtcaatatgaagagtaaagatgggaaaaccccactacacatgactgctctccacggtagattctcccgatcacaaaccattatcca

SEQ ID NO: 377 - DNA, 71 bp, Homo sapiens
gataaaagaagaagctagctgaacagctgtaaaatgcccaaatctgggttcacaaaaccaattcagagtga

SEQ ID NO: 378 - DNA, 407 bp, Homo sapiens
aacgaacaagaagttttgcgagttcattacagagctgcaagaacattggcaaatcaaacactgccatttagtgcttgtactgttttgctggatgccgaagtatacaatgtaccattggactctcagtctgatgacagtaaaacttctgtgagggatcgctttaatgcaagacaattcatgtcttggttacaagatgtggatgataaatttgacaaattaaagacctgtcttttaatgaggcaacaacatgaagctgcggctttaaatgctgtccagaggttagaatggcagctcaaactccaggaacttgatcctgccacctataaatctatcagcatttacgaaatccaggagttttatgttccccttgttgatgttaacgacgactttgaattgactcctatata

SEQ ID NO: 379 - DNA, 102 bp, Homo sapiens
gataaaagaagaagctagctgaacagctgtaaaatgcccaaatctgggttcacaaaaccaattcagagtgaaaattctgacagtgacagcaatatggtagag

SEQ ID NO: 380 - DNA, 36 bp, Homo sapiens
gctaacatcagctgttagttctttgccagaactcct

SEQ ID NO: 381 - DNA, 46 bp, Homo sapiens
ctggttaaaggtgactgattacatcgcagagaagaatctacctgtg

SEQ ID NO: 382 - DNA, 36 bp, Homo sapiens
gagtatattctgccaactctgtgaattcagtatcct

SEQ ID NO: 383 - DNA, 500 bp, Homo sapiens
gatattaacaaactaaaaccccagcaagaaccgggacgaacaatagaagatctaaaaatgtatgaacaccttttccctgagcttgttgatgattttcaggactatgatttaatctccaaagaaccaaagccttttgtatttgagggaaaagtacgtggtcctattgttgttcctacggcaggcgagggaacatctgggaattctggcaatttaagaaaagttgtaatgaaggagaacatatcttctaaaggagatgaaggtgaaaagaagtctacctttatggatctagcaaaagaagatattaaagataatgatagaacattacaacagcagccaggtgatcaaaatagaactatttcatcagtccatggtttaaacaatgatattgtaaaggccttggaccgaattacattgcagaatattccttctcaaacagccccaggttttactgcagaaatgaagaaggactgcagtcttcctcttactgtccttacctgtgc

SEQ ID NO: 384 - DNA, 500 bp, Homo sapiens
gcaatttaagaaaagttgtaatgaaggagaacatatcttctaaaggagatgaaggtgaaaagaagtctacctttatggatctagcaaaagaagatattaaagataatgatagaacattacaacagcagccaggtgatcaaaatagaactatttcatcagtccatggtttaaacaatgatattgtaaaggccttggaccgaattacattgcagaatattccttctcaaacagccccaggttttactgcagaaatgaagaaggactgcagtcttcctcttactgtccttacctgtgctaaagcatgtccacacatggctacttgtggaaatgttctgtttgagggaagaacagttcagctagggaagctttgctgcactggagttggaactgaagatgatgaagatactgagtcaaattcatcggtagaacaagcatcggttgaagtacctgatggaccaacactccatgacccagacctctatattgagattgtgaaaaat

SEQ ID NO: 385 - DNA, 36 bp, Homo sapiens
ctggactggaattctctgagctgcctgtaacatcac

SEQ ID NO: 386 - DNA, 36 bp, Homo sapiens
gaaacagcctcattcatggtttcacgtgccacgatc

SEQ ID NO: 387 - DNA, 187 bp, Homo sapiens
gagggttttctgagtatctggcaagttaaccaaactgcatcaaatcctaaaccttatatgagttggcagtgccacagtaaagccacaagtgactttgcatttattacctcttcaagtctagttgccacatctggacactccaatgacaatagaaatgtttgcctctgggacacattaatatcacccg

SEQ ID NO: 388 - DNA, 500 bp, Homo sapiens
gcagcatgtgatgcaacttacaatgaaattgtcacaattgaacgtctaagatctgttaatcccaacaaacctgccacaaaagatactttccataagatcaagctggatgtgccagaagacttacggcaaatgtgtgccaaagaggcggcacataaggattttaaaaaggcagttggtgccttttctgtaacttatgatccagaaaattatcagcttgtcattttgtccatcaatgaagtcacctcaaagcgagcacatatgctgattgacatgcactttcggagtctgcgcactaagttgtctctgataatgagaaatgaagaagctagtaagcagctggagagttcaaggcagcttgcctcgagatttcatgaacagtttatcgtaagagaagatctgatgggtctagctattggtactcatggtgctaatattcagcaagctagaaaagtacctggggtcactgctattgatctagatgaagatacctgcacatttca

SEQ ID NO: 389 - DNA, 500 bp, Homo sapiens
gattcccacctcctgtaggttataataaagatataaatgaaagtgatgaagttgaggtgtattccagagcaaatgaaaaagagccttgctgttggtggttagctaaagtgaggatgataaagggtgagttttatgtgatagaatatgcagcatgtgatgcaacttacaatgaaattgtcacaattgaacgtctaagatctgttaatcccaacaaacctgccacaaaagatactttccataagatcaagctggatgtgccagaagacttacggcaaatgtgtgccaaagaggcggcacataaggattttaaaaaggcagttggtgccttttctgtaacttatgatccagaaaattatcagcttgtcattttgtccatcaatgaagtcacctcaaagcgagcacatatgctgattgacatgcactttcggagtctgcgcactaagttgtctctgataatgagaaatgaagaagctagtaagcagctggagagttcaaggcag

SEQ ID NO: 390 - DNA, 500 bp, Homo sapiens
ttgtcattttgtccatcaatgaagtcacctcaaagcgagcacatatgctgattgacatgcactttcggagtctgcgcactaagttgtctctgataatgagaaatgaagaagctagtaagcagctggagagttcaaggcagcttgcctcgagatttcatgaacagtttatcgtaagagaagatctgatgggtctagctattggtactcatggtgctaatattcagcaagctagaaaagtacctggggtcactgctattgatctagatgaagatacctgcacatttcatatttatggagaggatcaggatgcagtgaaaaaagctagaagctttctcgaatttgctgaagatgtaatacaagttccaaggaacttagtaggcaaagtaataggaaaaaatggaaagctgattcaggagattgtggacaagtcaggagttgtgagggtgaggattgaggctgaaaatgagaaaaatgttccacaagaagaggaaattatgcca

SEQ ID NO: 391 - DNA, 136 bp, Homo sapiens
tacgaatgataagatctggtggtcttcattgtagcagcaatgccattagatttgttcctgatcttgaagatattgtaaattttgaagaactagtaaaagaagaaggtcttgcagaagaaacattaaaagcagcaag

SEQ ID NO: 392 - DNA, 36 bp, Homo sapiens
gaaatagatcatctggtgttcttgatgattacgcac

SEQ ID NO: 393 - DNA, 500 bp, Homo sapiens
agaaagaagaaaaagaaaaggagaaagatggtgagacctctggcagccaggaggaccagctgtgcacagctctggtgaaccagctgaacaaatttgccgataaggaaaccctgatccagttcctgcgttgtttcctgttagagtccaattcttcctcggtgcgctggcaggcccactgtctgacactgcacatctacagaaattccagcaaatctcaacaggagctcctgctagatctgatgtggtccatctggccagaactcccagcctatggtcgtaaggctgcccagtttgtggacctactaggatatttctccctgaaaactccacaaacagagaagaagttgaaggagtattcacagaaggctgtggagattctgcggactcaaaaccatattcttaccaaccaccccaactcgaacatttataacactttgtctggcttagtggagtttgatggctattacctggagagcgatccctgcctggtgtgtaataac

SEQ ID NO: 394 - DNA, 36 bp, Homo sapiens
cagcctggacagcaacaggtaggccttccttctatt

SEQ ID NO: 395 - DNA, 500 bp, Homo sapiens
gtgcatttaatcactgaagaagatctgaaacaaatctccactttagaaagcgttagtacaagtaaaaaggataaaaaagatgagcgaagaaggaaagcaacagagggcagtggaagcatgagaggaggaggtgggggcaatgccagagagtacaaaattaaaaaagtcaagaagaaaggaagaaaagatgatgatagtgatgatgaatctcaatcatcccacactggaaagaagaagccagagatcagttttatgttccaggatgagattgaagattttttaagaaaacacatacaagatgcccctgaggagtttatttcggaacttgctgagtacttaataaaacctcttaataaaacttatctcgaggtggtacgttcagtattcatgtcttcaacaacttctgcttctgggacgggcagaaaacgcacaatcaaggacttgcaagaagaagtttcaaacctgtacaataacattaggttatttgaaaaagggatgaa

SEQ ID NO: 396 - DNA, 497 bp, Homo sapiens
ctgtcgagaattggtggaagcaggttatgatgtacggcaaccggacaaagaaaatgttaccctcctccattgggctgccatcaataacagaatagatttagtcaaatactatatttcgaaaggtgctattgtggatcaacttggaggggacctgaattcaactccattgcactgggccacaagacaaggccatctatccatggttgtgcaactaatgaaatatggtgcagatccttcattaattgatggagaaggatgtagctgtattcatctggctgctcagttcggacatacctcaattgttgcttatctcatagcaaaaggacaggatgtagatatgatggatcagaatggaatgacgcctttaatgtgggcagcatatagaacacatagtgtggatccaactagattgcttttaacattcaatgtttcagttaaccttggtgacaagtatcacaaaaacactgctctgcattgggcagtgctagcagggaata

SEQ ID NO: 397 - DNA, 272 bp, Homo sapiens
atggcggacggcccggatgagtacgataccgaagcgggctgcgtgccccttctccatccagaggaaatcaaaccccaaagccattttaaccatggatatggtgaacctcttggacggaaaactcatattgatgattacagcacatgggacatagtcaaggctacacaatatggaatatatgaacgctgtcgagaattggtggaagcaggttatgatgtacggcaaccggacaaagaaaatgttaccctcctccattgggctgccatcaataa

SEQ ID NO: 398 - DNA, 328 bp, Homo sapiens
atatggaatatatgaacgctgtcgagaattggtggaagcaggttatgatgtacggcaaccggacaaagaaaatgttaccctcctccattgggctgccatcaataacagaatagatttagtcaaatactatatttcgaaaggtgctattgtggatcaacttggaggggacctgaattcaactccattgcactgggccacaagacaaggccatctatccatggttgtgcaactaatgaaatatggtgcagatccttcattaattgatggagaaggatgtagctgtattcatctggctgctcagttcggacatacctcaattgttgcttat

SEQ ID NO: 399 - DNA, 87 bp, Homo sapiens
ctgtcgagaattggtggaagcaggttatgatgtacggcaaccggacaaagaaaatgttaccctcctccattgggctgccatcaataa

SEQ ID NO: 400 - DNA, 112 bp, Homo sapiens
ggttgtgcaactaatgaaatatggtgcagatccttcattaattgatggagaaggatgtagctgtattcatctggctgctcagttcggacatacctcaattgttgttgcttat

SEQ ID NO: 401 - DNA, 500 bp, Homo sapiens
cacgggggcaggagaagaaggaggaggaggcccgcgtcgcctccggcggggctcgcgctcgccccgcgctcgccctccgcctcgcccgagccccgggagggtgaaacgctttctcccagcatgcagcgggaggagggatttaacaccaagatggcggacggcccggatgagtacgataccgaagcgggctgcgtgccccttctccatccagaggaaatcaaaccccaaagccattttaaccatggatatggtgaacctcttggacggaaaactcatattgatgattacagcacatgggacatagtcaaggctacacaatatggaatatatgaacgctgtcgagaattggtggaagcaggttatgatgtacggcaaccggacaaagaaaatgttaccctcctccattgggctgccatcaataacagaatagatttagtcaaatactatatttcgaaaggtgctattgtggatcaacttggaggggacctgaattcaactcc

SEQ ID NO: 402 - DNA, 29 bp, Homo sapiens
cagaatggaatgacgcctttaatgtgggc

SEQ ID NO: 403 - DNA, 497 bp, Homo sapiens
agatggcggacggcccggatgagtacgataccgaagcgggctgcgtgccccttctccatccagaggaaatcaaaccccaaagccattttaaccatggatatggtgaacctcttggacggaaaactcatattgatgattacagcacatgggacatagtcaaggctacacaatatggaatatatgaacgctgtcgagaattggtggaagcaggttatgatgtacggcaaccggacaaagaaaatgttaccctcctccattgggctgccatcaataacagaatagatttagtcaaatactatatttcgaaaggtgctattgtggatcaacttggaggggacctgaattcaactccattgcactgggccacaagacaaggccatctatccatggttgtgcaactaatgaaatatggtgcagatccttcattaattgatggagaaggatgtagctgtattcatctggctgctcagttcggacatacctcaattgttgcttat

SEQ ID NO: 404 - DNA, 497 bp, Homo sapiens
gaaatcaaaccccaaagccattttaaccatggatatggtgaacctcttggacggaaaactcatattgatgattacagcacatgggacatagtcaaggctacacaatatggaatatatgaacgctgtcgagaattggtggaagcaggttatgatgtacggcaaccggacaaagaaaatgttaccctcctccattgggctgccatcaataacagaatagatttagtcaaatactatatttcgaaaggtgctattgtggatcaacttggaggggacctgaattcaactccattgcactgggccacaagacaaggccatctatccatggttgtgcaactaatgaaatatggtgcagatccttcattaattgatggagaaggatgtagctgtattcatctggctgctcagttcggacatacctcaattgttgcttatctcatagcaaaaggacaggatgtagatatgatggatcagaatggaatgacgcctttaatgtgggc

SEQ ID NO: 405 - DNA, 25 bp, Homo sapiens
atcactgaagttggatggtctgtta

SEQ ID NO: 406 - DNA, 500 bp, Homo sapiens
ctaatctattgttgggcttaattattcgtcagaaactgaagcgacagcacagtgcctgtgctagtactagtcatatagctgagactcctgaaagtgcaccaccaatagcattgccacctgataaaaaaagtaaaatagaagtttctacagaagaagcaccagaggaagaaaatgacttttttaattcttttacaactgtattacacaagcagagaaataaacctcagcagaatcttcaggaagaccttccaacagcagttgaacctttaatggaagtcaccaaacaggagccaccaaaacctttaagatttcttcctggcgtgttgattggctgggagaatcaacctactactctggaattagcaaataaacctcttcctgtggatgatatacttcaaagccttttgggcaccactggtcaagtatatgaccaggcccagtcagtgatggaacaaaacactgttaaagaaattccatttttaaatgagcagaccaactca

SEQ ID NO: 407 - DNA, 36 bp, Homo sapiens
tttaaatgagcagaccaactcaaaaatagagaaaac

SEQ ID NO: 408 - DNA, 500 bp, Homo sapiens; identical to SEQ ID NO: 406

SEQ ID NO: 409 - DNA, 500 bp, Homo sapiens
tttgccaagatgccggacgagcctgaggagccagtggtggccgtgtcctccccggcagtgccccctcccaccaaggttgtggccccgccctcatccagcgacagcagcagcgatagctcctcggacagtgacagttcgactgatgactctgaggaggagcgagcccagcggctggctgagctccaggagcagctcaaagccgtgcacgagcagcttgcagccctctctcagccccagcagaacaaaccaaagaaaaaggagaaagacaagaaggaaaagaaaaaagaaaagcacaaaagaaaagaggaagtggaagagaataaaaaaagcaaagccaaggaacctcctcctaaaaagacgaagaaaaataatagcagcaacagcaatgtgagcaagaaggagccagcgcccatgaagagcaagccccctcccacgtatgagtcggaggaagaggacaagtgcaagcctatgtcctatgaggagaagcggcagctcagctt

SEQ ID NO: 410 - DNA, 500 bp, Homo sapiens
agaagagcagcaaggtctcggagcagctcaagtgctgcagcggcatcctcaaggagatgtttgccaagaagcacgccgcctacgcctggcccttctacaagcctgtggacgtggaggcactgggcctacacgactactgtgacatcatcaagcaccccatggacatgagcacaatcaagtctaaactggaggcccgtgagtaccgtgatgctcaggagtttggtgctgacgtccgattgatgttctccaactgctataagtacaaccctcctgaccatgaggtggtggccatggcccgcaagctccaggatgtgttcgaaatgcgctttgccaagatgccggacgagcctgaggagccagtggtggccgtgtcctccccggcagtgccccctcccaccaaggttgtggccccgccctcatccagcgacagcagcagcgatagctcctcggacagtgacagttcgactgatgactctgaggaggagcgagcccagcggctg

SEQ ID NO: 411 - DNA, 142 bp, Homo sapiens
acattttctcagggacctacgttgcagttcactcttcgttggacaggagagaccaatgataaatctacggctcctattgccaaacctcttgccactagaaattcagagagtctccatcaggaaaacaagcctggttcagtta

SEQ ID NO: 412 - DNA, 93 bp, Homo sapiens
tatctaaagccaagaatgcagatcatcctacgtggacagaaagtgaagacacagctggtttcgaagagtcttgcctacatcgaacgtgatgtt

SEQ ID NO: 413 - DNA, 500 bp, Homo sapiens
tgctaagctttggcttcagtgacaaagtcaccatgaatggtcatgtcccagttggattatatgggaatggcttcaagtcgggttctatgcgtctgggtaaagacgcaatcgtttttaccaaaaatggagaaagcatgagcgtgggccttttgtctcagacctacttggaagtcataaaagcggagcatgttgttgttccaatagtggcattcaacaagcaccgacagatgattaatttagcagaatcaaaagccagccttgctgcaattctggaacattctctgttttccacggaacagaagttactggcagaacttgatgctattataggcaagaaggggacgaggatcatcatttggaatcttagaagctacaaaaatgcaacagagttcgattttgaaaaggataaatatgatatcagaattcccgaggatttagatgagataacagggaagaaggggtacaagaagcaggaaaggatggaccagattgcccctgag

SEQ ID NO: 414 - DNA, 70 bp, Homo sapiens
agattccgaaaagctgcgccaggcatggattaaggctgttcagaccagtattgctactgcttatagagag

SEQ ID NO: 415 - DNA, 179 bp, Homo sapiens
gaagaaggctgcattccgaatatcgccccagacatctgcatagcatacaaactgcacctagagtgtagcaggctcatcaacctcgtggactggtcagaggcttttgcaacagttgtgacagctgctgaaaaaatggatgcaaattctgcaacctcagaagaaatgaatgaaattatcca

SEQ ID NO: 416 - DNA, 500 bp, Homo sapiens
ttaaaaattctctatcttcaaaataatcttattgggaaaattgaaaatgttagcaaactcaagaaacttgaatatttgaatttagctttaaacaacattgaaaaaatagaaaacttggaaggatgtgaagagctggcaaaacttgacctgactgtgaatttcattggagagctgagcagcattaaaaacttgcagcacaatatccatctgaaggagctctttctcatggggaacccatgtgcttcctttgaccactatagggagttcgtggtagcaactcttccacaattaaagtggttggatggtaaagaaatagagccttcagaaaggattaaggcattgcaggactattcagtaattgaaccacaaatcagagagcaggaaaaagatcactgtcttaaacgagccaaactcaaggaagaggctcagaggaaacaccaagaagaggataaaaatgaagacaagagaagtaacgcaggctttgatggacgttggtacac

SEQ ID NO: 417 - DNA, 500 bp, Homo sapiens
agataacgaaaagcagatcatcctggaccttgctgtctataggtatatggatacctctttaatcgatgttgatgtgcaaccaacttacgtgcgagtaatgatcaaaggaaagccatttcagcttgtccttcctgcagaagtgaaacccgatagtagttctgctaaaagatctcagacaacgggtcatttggtcatctgcatgcccaaggtaggagaagtaatcacaggtggtcagcgagcattcaaatctatgaaaactacctcggacaggagcagagaacaaacaaatacaagaagcaagcacatggagaaactagaagtagaccctagcaagcactcattccctgatgtgactaacatagttcaagagaaaaaacacacacccagaagacgacctgaacccaaaattataccaagtgaggaagacccaacctttgaagacaaccctgaagtgcctccgctgatttgaaacatctggctgcgttgccattggctgagac

SEQ ID NO: 418 - DNA, 500 bp, Homo sapiens
actgtcttaaacgagccaaactcaaggaagaggctcagaggaaacaccaagaagaggataaaaatgaagacaagagaagtaacgcaggctttgatggacgttggtacacagacatcaatgctactctttcctctttagagagcaaagaccacctacaggcaccagacacagaggaacacaacacaaagaaattagacaacagtgaagatgacttggaattctggaataagccctgtttgtttactcctgaatcaagattggaaactcttagacacatggaaaaacaacggaagaaacaggaaaaattaagtgaaaaaaagaagaaagtgaaaccacccaggactttgatcactgaagatgggaaagccctaaatgtgaatgagcccaaaattgacttctctttgaaagataacgaaaagcagatcatcctggaccttgctgtctataggtatatggatacctctttaatcgatgttgatgtgcaaccaacttacgtgcga

SEQ ID NO: 419 - DNA, 500 bp, Homo sapiens
ttggtacacagacatcaatgctactctttcctctttagagagcaaagaccacctacaggcaccagacacagaggaacacaacacaaagaaattagacaacagtgaagatgacttggaattctggaataagccctgtttgtttactcctgaatcaagattggaaactcttagacacatggaaaaacaacggaagaaacaggaaaaattaagtgaaaaaaagaagaaagtgaaaccacccaggactttgatcactgaagatgggaaagccctaaatgtgaatgagcccaaaattgacttctctttgaaagataacgaaaagcagatcatcctggaccttgctgtctataggtatatggatacctctttaatcgatgttgatgtgcaaccaacttacgtgcgagtaatgatcaaaggaaagccatttcagcttgtccttcctgcagaagtgaaacccgatagtagttctgctaaaagatctcagacaacgggtcatttggtca

SEQ ID NO: 420 - DNA, 500 bp, Homo sapiens
caggtgtgaggaatgtgggaaaagctacaaccaacgcgtgcacctaactcagcatcagcgcgtccacacaggtgagaagccctacacctgtcccttatgtgggaaagccttcagagtgaggtcccaccttgttcagcatcagagcgtgcacagtggggagagacccttcaagtgtaacgaatgtgggaaaggctttgggaggcgttcccacctggctggacatcttcgactccactcccgagagaaatcccatcagtgtcgtgaatgtggggaaatcttttttcagtacgttagcctaattgaacatcaggtgctccacatgggtcagaaaaatgaaaaaaatggcatctgtgaggaagcatatagttggaacttgacagtgattgaagacaagaagattgagttacaagagcagccttatcagtgtgatatctgtggaaaagcctttggttatagctcagacctcattcagcattacagaactcatacagcagagaagc

SEQ ID NO: 421 - DNA, 372 bp, Homo sapiens
tttacttaaggaagacattgatctgtttgaggtagaagatacaattgggcaacagcttgaatttcttaccacaaaatctagacttgctctttataacctattggcctatgtgaaacacctaaaaggccaaaataaagacgcccttgagtgcttggaacaagcagaagaaataatccagcaagaacactcagacaaagaagaagtacgaagcctggtcacttggggaaactatgcctgggtgtattatcacatggaccagcttgaagaagctcagaagtatacaggtaagatagggaatgtctgtaagaaattgtccagtccttctaactacaagttggagtgtcctgagactgactgtgagaaaggctgggc

SEQ ID NO: 422 - DNA, 143 bp, Homo sapiens
ttggcaacaccattatgacatcacaacctatttccaatgagaccatcataatgctcccatcaaatgtcatcaacttctcccaagcagagaaacccgaacccaccaaccaggggcaggatagcctgaagaaacgtctacaggca

SEQ ID NO: 423 - DNA, 36 bp, Homo sapiens
tgatttcttttctttcagggaaatatcggctcatca

SEQ ID NO: 424 - DNA, 96 bp, Homo sapiens
aaatgaagcaaaagaagtgcgagcagcagggctacgagcgcttcgatatctcatccaagactccagtattctccagaaggtgctaaaattgaaagt

SEQ ID NO: 425 - DNA, 36 bp, Homo sapiens
atttttttaatcttttaggtgctggaaatctagatg

SEQ ID NO: 426 - DNA, 46 bp, Homo sapiens
gatagctatgagacagaaaaccagcattacggaagaagcttaacaa

SEQ ID NO: 427 - DNA, 36 bp, Homo sapiens
gttgaacatggcagaagaagaggactatatgtctga

SEQ ID NO: 428 - DNA, 500 bp, Homo sapiens
cccctccaaagagttctacttgtccaattctgaaaaggaacgttatgaaaaagaattcagccaagaaagacaacaagaaattttgagaagagcagcaagagctttacctatctataccacatcagcttcaaaaactatcagatattgtgaaaaatgtcagctgattaaacctgatcgggcgcatcactgctcagcctgtgactcatgtattcttaagatggatcatcactgtccttgggtgaataactgtgtgggattttctaattacaaattcttcctgctgtttttattgtattccctattatattgccttttcgtggctgcaacagttttagagtactttataaaattttggacgaatgaactgacagatacacgtgcaaaattccacgtactttttcttttctttgtgtctgcaatgttcttcatcagcgtcctctcacttttcagctaccactgctggctagttggaaaaaatagaacaacaatagaatcattcc

SEQ ID NO: 429 - DNA, 500 bp, Homo sapiens
ttgtggctttccatctgttctttgttatgtttgtatggtcctattggatgacaattttcacatctcccgcttccccctccaaagagttctacttgtccaattctgaaaaggaacgttatgaaaaagaattcagccaagaaagacaacaagaaattttgagaagagcagcaagagctttacctatctataccacatcagcttcaaaaactatcagatattgtgaaaaatgtcagctgattaaacctgatcgggcgcatcactgctcagcctgtgactcatgtattcttaagatggatcatcactgtccttgggtgaataactgtgtgggattttctaattacaaattcttcctgctgtttttattgtattccctattatattgccttttcgtggctgcaacagttttagagtactttataaaattttggacgaatgaactgacagatacacgtgcaaaattccacgtactttttcttttctttgtgtctgcaatgttcttc

SEQ ID NO: 430 - DNA, 500 bp, Homo sapiens
aatgtcagctgattaaacctgatcgggcgcatcactgctcagcctgtgactcatgtattcttaagatggatcatcactgtccttgggtgaataactgtgtgggattttctaattacaaattcttcctgctgtttttattgtattccctattatattgccttttcgtggctgcaacagttttagagtactttataaaattttggacgaatgaactgacagatacacgtgcaaaattccacgtactttttcttttctttgtgtctgcaatgttcttcatcagcgtcctctcacttttcagctaccactgctggctagttggaaaaaatagaacaacaatagaatcattccgcgcacccacgttttcatacggacctgatggaaatggtttctctcttggatgcagtaaaaattggagacaagtctttggtgatgaaaagaaatattggctacttccaatattttcaagcttgggtgatggttgcagttttccaactcgcctt

SEQ ID NO: 431 - DNA, 293 bp, Homo sapiens
gaaaaggaacgttatgaaaaagaattcagccaagaaagacaacaagaaattttgagaagagcagcaagagctttacctatctataccacatcagcttcaaaaactatcagatattgtgaaaaatgtcagctgattaaacctgatcgggcgcatcactgctcagcctgtgactcatgtattcttaagatggatcatcactgtccttgggtgaataactgtgtgggattttctaattacaaattcttcctgctgtttttattgtattccctattatattgccttttcgtggctgc

SEQ ID NO: 432 - DNA, 500 bp, Homo sapiens
tcatcactgtccttgggtgaataactgtgtgggattttctaattacaaattcttcctgctgtttttattgtattccctattatattgccttttcgtggctgcaacagttttagagtactttataaaattttggacgaatgaactgacagatacacgtgcaaaattccacgtactttttcttttctttgtgtctgcaatgttcttcatcagcgtcctctcacttttcagctaccactgctggctagttggaaaaaatagaacaacaatagaatcattccgcgcacccacgttttcatacggacctgatggaaatggtttctctcttggatgcagtaaaaattggagacaagtctttggtgatgaaaagaaatattggctacttccaatattttcaagcttgggtgatggttgcagttttccaactcgccttgtggggatggatccagaacaagcttctgttacaaaccagaatgagtatgccagaagtggctcaaatcaac

SEQ ID NO: 433 - DNA, 500 bp, Homo sapiens
attttctaattacaaattcttcctgctgtttttattgtattccctattatattgccttttcgtggctgcaacagttttagagtactttataaaattttggacgaatgaactgacagatacacgtgcaaaattccacgtactttttcttttctttgtgtctgcaatgttcttcatcagcgtcctctcacttttcagctaccactgctggctagttggaaaaaatagaacaacaatagaatcattccgcgcacccacgttttcatacggacctgatggaaatggtttctctcttggatgcagtaaaaattggagacaagtctttggtgatgaaaagaaatattggctacttccaatattttcaagcttgggtgatggttgcagttttccaactcgccttgtggggatggatccagaacaagcttctgttacaaaccagaatgagtatgccagaagtggctcaaatcaaccttttcctatcaaaccacttagtgaatcaaaaa

SEQ ID NO: 434 - DNA, 382 bp, Homo sapiens
tcctatcaaaccacttagtgaatcaaaaaaccgcttgttggacagtgaatctcagtggctggagaatggagctgaagaaggcatcgtcaaatcaggtgtatgaaaacattatagactggtattttcaattttcatttgcaagaaaatgatcagtggaatgaaataactgaagtataacagaagatatattttttaaaacggaaagcctttgtacagttcctgggattcacagaagcactactccagagcagaatgatgccttaatcttaagtgtccatttgtgcagcattgacttagagctacaaaagtgacttaatgttattctggaaataatacttacctgttatgagttgctataatatgagctgtcatcacattttaa

SEQ ID NO: 435 - DNA, 217 bp, Homo sapiens
tccggaacgaccttattctgcaccagcttttactaccaggctctgagtggagaccccagcatccagactttggcccctgcgggagggaccctgctactcttgggctggcttgccttggctctttgagctcccttttgcttaattactgggttttctgggcagttttttttttaaagagttggagtaagaagaggattaaaaaggaaaggcaaataaa

SEQ ID NO: 436 - DNA, 210 bp, Homo sapiens
acatccttgaaattgttaaacctgcggacactgttgaggttgttattgatccagatgcccaccatgctgaatcagaagcacatcttgttgaagaagctcaagtgataactcttgatggcacaaaacacatcacaaccatttcagatgaaacttcagaacaagtgacaagatgggctgctgcactggaaggctataggaaagaacaagaac

SEQ ID NO: 437 - DNA, 293 bp, Homo sapiens
ggagacttactgaatatattcattgtttgcaacctgctactggacgctggagaatgcttcttatagtggtatctgtctgtacagctactggtgcctggaactggttaatagaccctgagacacaaaaggtgtccttcttcacatcattatggaatcacccatttttcaccattagctgtatcactctaataggcttgttctttgctggaatacacaagagagtagttgcaccatcaattatagctgctcgatgtcgaacggtattagcagaatacaatatgtcttgtgatgat

SEQ ID NO: 438 - DNA, 500 bp, Homo sapiens
ctgtctgtacagctactggtgcctggaactggttaatagaccctgagacacaaaaggtgtccttcttcacatcattatggaatcacccatttttcaccattagctgtatcactctaataggcttgttctttgctggaatacacaagagagtagttgcaccatcaattatagctgctcgatgtcgaacggtattagcagaatacaatatgtcttgtgatgatacaggaaaactaattttgaaacctaggcctcatgttcaatgacaatcttcactcattgttatgggacttaaaatagcctttcttcgaataagtgatacagcaaaaagccataaaggattccttttgcggttggatatgtaaaggtcatagcagcaactgacaagaagtgtgcaatatttacctggattatcttgatgatggtgactcattatcagtgctttggtacttttgattacctgtgtttcagtattagtgtcactttagtacttcagatcctgc

SEQ ID NO: 439 - DNA, 242 bp, Homo sapiens
ggacagggcagcggcggtgacccgagctgccgcccgacatgaactcgctggagcaggcggaagccccgcgagttgtatccctgattcctgcggtggtttccggtaactgccaagatctcaaggcttttgagaggagacttactgaatatattcattgtttgcaacctgctactggacgctggagaatgcttcttatagtggtatctgtctgtacagctactggtgcctggaactggttaata

SEQ ID NO: 440 - DNA, 114 bp, Homo sapiens
ttggccttcaagttaaaaggaaggaagccgtattcccgatggctagtgtttaatgactacaggtttccaggctccctttaatcttgggagcaaataaatctactattggacttc

SEQ ID NO: 441 - DNA, 26 bp, Homo sapiens
tgagttagtgccagatggaatttaaa

SEQ ID NO: 442 - DNA, 78 bp, Homo sapiens
ttagatgttcaatctgtgcaagaaaagagaaagaaaaaggaaaaaatagaaaaacaaattgctacatccgggccccca

SEQ ID NO: 443 - DNA, 277 bp, Homo sapiens
gagtcttgattgatgacctcactactctgggcaccagtgaaccataccgcatgtttaccagccgagtagagttccgtttgtcactgcgccctgataatgctgacagccggctcacactgcgagggtataaagacgctggctgtgtgtcccaacaacgatatgaaagagcttgttggatgaagtcttctttagaagaaggcatttctgtgttgaaatctattgagtttttgagctctaaatggaaaaaattaatcccagaggcttctataagtactag

SEQ ID NO: 444 - DNA, 36 bp, Homo sapiens
tggctgttgacatggatggtgagtacctttctatga

SEQ ID NO: 445 - DNA, 36 bp, Homo sapiens
atcgaattatttttctaggctcaagaccacctttaa

SEQ ID NO: 446 - DNA, 36 bp, Homo sapiens
cttgctgtcaaacttcagagtgaatgccatccagat

SEQ ID NO: 447 - DNA, 500 bp, Homo sapiens
gatgaatcctttgatgaaatggacagtacactagctgttcaacagtatattcaacagaacataagagcagattgctccaatattgacaaaattcttgaaccacctgaaggccaagatgaaggtgtgtggaagtatgaacatttaaggcagttctgccttgagctaaatggacttgctgtcaaacttcagagtgaatgccatccagatacttgcactcaaatgacagcaactgaacaatggatttttctttgtgcagctcataaaactccaaaagagtgtcctgctatagactatactagacacacacttgatggtgctgcatgtcttctgaatagcaataaatattttcccagcagggttagcataaaggaatcatctgtagcgaaactaggatcagtatgccgtaggatttacagaatattttcacatgcttattttcatcatcggcagatatttgatgaatatgaaaatgaaacatttttgtgtcatcggtttactaa

SEQ ID NO: 448 - DNA, 112 bp, Homo sapiens
gcagttctgccttgagctaaatggacttgctgtcaaacttcagagtgaatgccatccagatacttgcactcaaatgacagcaactgaacaatggatttttctttgtgcagct

SEQ ID NO: 449 - DNA, 65 bp, Homo sapiens
agagcagattgctccaatattgacaaaattcttgaaccacctgaaggccaagatgaaggtgtgtg

SEQ ID NO: 450 - DNA, 500 bp, Homo sapiens
aaatggacttgctgtcaaacttcagagtgaatgccatccagatacttgcactcaaatgacagcaactgaacaatggatttttctttgtgcagctcataaaactccaaaagagtgtcctgctatagactatactagacacacacttgatggtgctgcatgtcttctgaatagcaataaatattttcccagcagggttagcataaaggaatcatctgtagcgaaactaggatcagtatgccgtaggatttacagaatattttcacatgcttattttcatcatcggcagatatttgatgaatatgaaaatgaaacatttttgtgtcatcggtttactaagtttgtgatgaaatacaatttgatgtccaaggataacctgattgtaccaattttagaagaggaagtacagaattcagtttctggggaaagtgaagcatgaagggaatcataggaaaaatgtactgatcatataattaacattatgtactgtatatatcatttta

SEQ ID NO: 451 - DNA, 445 bp, Homo sapiens
atttgccaagactgctggcctgttttctaccctgattccttaggtggcttctgggacagaattacggttctctaagtatttgcttgcaggatttctataattggcctgatgaatcctttgatgaaatggacagtacactagctgttcaacagtatattcaacagaacataagagcagattgctccaatattgacaaaattcttgaaccacctgaaggccaagatgaaggtgtgtggaagtatgaacatttaaggcagttctgccttgagctaaatggacttgctgtcaaacttcagagtgaatgccatccagatacttgcactcaaatgacagcaactgaacaatggatttttctttgtgcagctcataaaactccaaaagagtgtcctgctatagactatactagacacacacttgatggtgctgcatgtcttctgaatagcaa

SEQ ID NO: 452 - DNA, 154 bp, Homo sapiens
gaagaggatgatgaagatgatgaggatagtgaagaggactcagaggatgatgaggatatgcaggacatggacgagatgaatgactacaatgagtcaccggatgatggagaggtcaatgaggtggacatggaaggcaacgaacaggatcaggacc

SEQ ID NO: 453 - DNA, 36 bp, Homo sapiens
agacactcgacctcctgaatgtattgaacaaaaatt

SEQ ID NO: 454 - DNA, 497 bp, Homo sapiens
ctagtaaaattacacattaaaagacattaccataaaaagttctggaagcttggtgcagtaatttttttctttataatagttttggttttaatgcaaagagaagtaagtgttcaatattccaaagaggaatcaaggatggaaaggaacatgaaaaacaaaaacaagatgttggatttaatgctagaagctgtaaacaatattaaggatgccatgccaaaaatgcaaataggagcacctgtcaggcaaaacattgatgctggtgagagaccttgtttgcaaggatattatacagcagcagaattgaagcctgtccttgaccgtccacctcaggattcaaatgcacctggtgcttctggtaaagcattcaagacaaccaatttaagtgttgaagagcaaaaggaaaaggaacgtggggaagctaaacactgctttaatgctttcgcaagtgacaggatttctttgcaccgagatcttggaccagacactcgacctcctga

SEQ ID NO: 455 - DNA, 165 bp, Homo sapiens
cagttggagattatgccttgctctgttgttggacatgtttttcgcagcaaaagccctcatagctttccaaaaggcactcaggtgattgctagaaaccaagttcgccttgcagaagtctggatggatgaatacaaggaaatattttataggagaaatacagatgca

SEQ ID NO: 456 - DNA, 36 bp, Homo sapiens
atgccattcgtacctctgagatcccatttcattctg

SEQ ID NO: 457 - DNA, 321 bp, Homo sapiens
gatattcgactctccagggttcaggatatcaagtatgagccccagctccttgcagatgatgatgctagactactacaactggaaacccagggaaatcaaagttgctacaactatctgtataggatgaaagctctggatgccattcgtacctctgagatcccatttcattctgaaggccggcatccccgttccttaatgggcaagaatttccgctcctacctgctggatctgcgaaacactagtacgcctttcaagggtgtacgcaaagcactcattgatacccttttggatggctatgaaacagcccgctatgggacaggg

SEQ ID NO: 458 - DNA, 500 bp, Homo sapiens
gatattcgactctccagggttcaggatatcaagtatgagccccagctccttgcagatgatgatgctagactactacaactggaaacccagggaaatcaaagttgctacaactatctgtataggatgaaagctctggatgccattcgtacctctgagatcccatttcattctgaaggccggcatccccgttccttaatgggcaagaatttccgctcctacctgctggatctgcgaaacactagtacgcctttcaagggtgtacgcaaagcactcattgatacccttttggatggctatgaaacagcccgctatgggacaggggtctttggccagaatgagtacctacgctatcaggaggccctgagtgagctggccactgcggttaaagcacgaattgggagctctcagcgacatcaccagtcagcagccaaagacctaactcagtcccctgaggtctccccaacaaccatccaggtgacatacctcccctccagtcagaa

SEQ ID NO: 459 - DNA, 82 bp, Homo sapiens
gatattcgactctccagggttcaggatatcaagtatgagccccagctccttgcagatgatgatgctagactactacaactgg

SEQ ID NO: 460 - DNA, 194 bp, Homo sapiens
gatattcgactctccagggttcaggatatcaagtatgagccccagctccttgcagatgatgatgctagactactacaactggaaacccagggaaatcaaagttgctacaactatctgtataggatgaaagctctggatgccattcgtacctctgagatcccatttcattctgaaggccggcatccccgttcctt

SEQ ID NO: 461 - DNA, 136 bp, Homo sapiens
gatattcgactctccagggttcaggatatcaagtatgagccccagctccttgcagatgatgatgctagactactacaactggaaacccagggaaatcaaagttgctacaactatctgtataggatgaaagctctgg

SEQ ID NO: 462 - DNA, 110 bp, Homo sapiens
gagctctcagcgacatcaccagtcagcagccaaagacctaactcagtcccctgaggtctccccaacaaccatccaggtgacatacctcccctccagtcagaagagtaaac

SEQ ID NO: 463 - DNA, 149 bp, Homo sapiens
agatcccatttcattctgaaggccggcatccccgttccttaatgggcaagaatttccgctcctacctgctggatctgcgaaacactagtacgcctttcaagggtgtacgcaaagcactcattgatacccttttggatggctatgaaaca

SEQ ID NO: 464 - DNA, 96 bp, Homo sapiens
cccagctccttgcagatgatgatgctagactactacaactggaaacccagggaaatcaaagttgctacaactatctgtataggatgaaagctctgg

SEQ ID NO: 465 - DNA, 429 bp, Homo sapiens
gtcagggggaagctggaaggcgtcgttctcctttcccagctctcctgcctgtccgccatgttttcaggccgggtctggcttggtcttcccccgtaaggaaatggccggggagctccaggggacccaggcgccgtcgcttcggcggagctgggctgaccagccaggacagcggggtaaacccgaacaattctgcgcgaggtagggaggccatggcgtccggcagtaactggctctccggggtgaatgtcgtgctggtgatggcctacgggagcctggacttgaaagaggagattgatattcgactctccagggttcaggatatcaagtatgagccccagctccttgcagatgatgatgctagactactacaactggaaacccagggaaatcaaagttgctacaactatctgtataggatgaaagctctgg

SEQ ID NO: 466 - DNA, 40 bp, Homo sapiens
agcaccttcctgtttgacaacgacttcccagctctgcagc

SEQ ID NO: 467 - DNA, 500 bp, Homo sapiens
ggccatccctctaaatgttctaggaaggcatgtctattgtgattttgatgaagacagaattatttttctctgtagaaacacagataccactttatcagggaagttagtcaaatgaaatggaaattggtaaatggacaaaagctagctagtaaaaaggacgacccagcaacatgctttaaccccattgtatgtttgtggaaagagcatagtttaacatcttgagaaatttgggacataaagttttcatggtagacagttcatgcagtatatgaattgacataatggaaataatctgattttatttttacaactaacatccattccccttcatttaaacaccttttgtgttttacttcagtgaggagattggagtctgaatggatctgttttccaagagattctgagaaatttttgtattcagcagttggaaagctctctattctagttgataaaacttcccttttttgatgtagatgcagatattctatacagttctgttg

SEQ ID NO: 468 - DNA, 41 bp, Homo sapiens
atggacaaaagctagctagtaaaaaggacgacccagcaaca

SEQ ID NO: 469 - DNA, 49 bp, Homo sapiens
tgaaatgcagaggggaaacagtagcaaaggagatcagtgaagccatgaa

SEQ ID NO: 470 - DNA, 224 bp, Homo sapiens
tgaacataggatgttgccacaaaatctacctcgtgtatttttctctttcactcatgagctgcacaattgcagatttgagcacaatgtctgcagactgtgttgaaaaactctgaagaacctaattaacacaggatgacctaggagtgattctaagtctgtgtaacaagatattactcattagtgaatgtgtcagtcttggtactgaatgctgcagataacagcaa

SEQ ID NO: 471 - DNA, 230 bp, Homo sapiens
ctgaagtattcacttgaccttccatcagtaagacggacttttctaatctgttcctggagatattaatggaatacagtcatgtccactcaagacgagaggcagatcaatactgaatatgctgtgtcattgttggaacagttgaaactgttttatgaacagcagttgtttactgacatagtgttaattgttgagggcactgaattcccttgtcataagatggttcttgcaac

SEQ ID NO: 472 - DNA, 162 bp, Homo sapiens
tgaacataggatgttgccacaaaatctacctcgtgtatttttctctttcactcatgagctgcacaattgcagatttgagcacaatgtctgcagactgtgttgaaaaactctgaagaacctaattaacacaggatgacctaggagtgattctaagtctgtgta

SEQ ID NO: 473 - DNA, 36 bp, Homo sapiens
gctgtagcaggactccaggaagatgttaccgagtac

SEQ ID NO: 474 - DNA, 500 bp, Homo sapiens
ttatgcaagattggttgctacattgcatccctgcatgtctgatgtagcagaggatctttgttccatgctgaggggggatttcagatttcatgtacggaaaaaggaccagatcaatattgaaacaaagaataaaactgttcgttttataggagaactaactaagtttaagatgttcaccaaaaatgacacactgcattgtttaaagatgcttctgtcagacttctctcatcaccatattgaaatggcatgcaccctgctggagacatgtggacggtttcttttcagatctccagaatctcacctgaggaccagtgtacttttggagcaaatgatgagaaagaagcaagcaatgcatcttgatgcgagatacgtcacaatggtagagaatgcatattactactgcaacccacctccagctgaaaaaaccgtgaaaaagaaacgtcctcctctccaggaatatgtccggaaacttttgtacaaggatctctctaaggttacca

SEQ ID NO: 475 - DNA, 25 bp, Homo sapiens
gtggcacctgcaccaaagcatttca

SEQ ID NO: 476 - DNA, 48 bp, Homo sapiens
ccagctggccctgaggcatctgagtcaacaacggatgaaaatgaagac

SEQ ID NO: 477 - DNA, 36 bp, Homo sapiens
ttgctttccctgtcacaggtggtggcagcaatattg

SEQ ID NO: 478 - DNA, 500 bp, Homo sapiens
atgttgcctttcggagaagaacagagaaaatgcaaactcgaaagaatcgtaagaatgatgaagcctcttatgaaaagatgttgaaactgagacgagaatttagtagagccataacaattttggaaatgattaagagaagagagaaaacaaaacgagaattattgcacttaaccttagaagttgtggagaaaagataccatttgggagactatggtggtgaaatccttaatgaagtaaaaatcagtagatcagaaaaagagttatatgccactccagcaactcttcataatggaaatcatcacaaagttcaagaatgtaaaactaagcaccctcatcatttgtctttgaaagaagaggcttctgatgtggttcgtcaaaagaagaagtacccaaagaagcctaaagcagaggctttgataacatctcagcaacccactcctgagacattgcctgtgatcaataagagtgacattaagcaatatgattttcacagctcagat

SEQ ID NO: 479 - DNA, 93 bp, Homo sapiens
gcacttgccgacgctaaagctcttgttgaaagattaagagatcatgacgatgcagcagaatctctgattgagcaaaccacagctctcaacaag

SEQ ID NO: 480 - DNA, 78 bp, Homo sapiens
gaccagataactgaaatggcagcagtaatgaggaaagccattgaaattgacgagcaacagggttgcaaggaacaagaa

SEQ ID NO: 481 - DNA, 500 bp, Homo sapiens
ggcggaagttcgacggcgccgggcgagtggctgttgagcggcgccgcgggagttccgcaggtttcccgtgttcgcagcggagccggaggccagctgaacccggccgtgggatcccggataggaggaggaggggacccataggacgcgttaacatggacctggaaaacaaagtgaagaagatgggcttaggtcacgagcaaggatttggagccccttgtttaaaatgcaaagaaaaatgtgaaggattcgaactgcacttctggagaaaaatatgtcgtaactgcaagtgtggccaagaagagcatgatgtcctcttgagcaatgaagaggatcgaaaagtgggaaaactttttgaagacaccaagtataccactctgattgcaaaactaaagtcagatggaattcccatgtataaacgcaatgttatgatattgacgaatccagttgctgccaagaagaatgtctccatcaatacagttacctatgagtgggctcctcct

SEQ ID NO: 482 - DNA, 288 bp, Homo sapiens
acacaccataggatatagtcaagaagcctttggacatgggagtttcaagctcaaaggagaattcatacctgaagagaaatttggaagccatcaatacattggtagttgataagctcatgaaaagagattgccaaaggaaaatgtgttgaataggaagagacagaatatccatcagagtgcctgattcagtagcattgatttcttttctttacttgccttgtcaataacacaatatttttagtataaatttaaatggaaaaatttcccttaatgaaagaacaaagactt

SEQ ID NO: 483 - DNA, 36 bp, Homo sapiens
tattttgatgtgccacaggtaaatttttccataacc

SEQ ID NO: 484 - DNA, 36 bp, Homo sapiens
ttcttgccgatgaagattgtatgcaggcccaatcta

SEQ ID NO: 485 - DNA, 41 bp, Homo sapiens
attcctgagaaaaatcacactctccaagcagactcttattc

SEQ ID NO: 486 - DNA, 26 bp, Homo sapiens
gtgtaaaactccgaagtcctaaatca

SEQ ID NO: 487 - DNA, 277 bp, Homo sapiens
tcagctgaagcagcttgtgatatactatcgcaacttgtgaattgctctttaaaaacacttggacttatttcaactgctcgaccaagctttatggatttaccaaagtctcactttatctctgcactgacagttgtgttcgtaaactccaaatccctgtcttcgcttaagatagatgatactccagtagatgatccatctctcaaagtactagtggccaacaatagtgatacactcaagctgttgaaaatgagcagctgtcctcatgtctctccagcag

SEQ ID NO: 488 - DNA, 397 bp, Homo sapiens
ctgtctggttgtgagaaaatcacagatgtggccctagagaagatttccagagctcttggaattctgacatctcatcaaagtggctttttgaaaacatctacaagcaaaattacttcaactgcgtggaaaaataaagacattaccatgcagtccaccaagcagtatgcctgtttgcacgatttaactaacaagggcattggagaagaaatagataatgaacacccctggactaagcctgtttcttctgagaatttcacttctccttatgtgtggatgttagatgctgaagatttggctgatattgaagatactgtggaatggagacatagaaatgttgaaagtctttgtgtaatggaaacagcatccaactttagttgttccacctctggttgtttta

SEQ ID NO: 489 - DNA, 36 bp, Homo sapiens
ctgaaacacaatgcacagagagaggatgcttctctt

SEQ ID NO: 490 - DNA, 36 bp, Homo sapiens
tcatcaccagatgtgttgtgacatttcgcatctttc

SEQ ID NO: 491 - DNA, 116 bp, Homo sapiens
gtccattgaactgggaatattttcaatccagctgctacttcttttctactgacaccatttcctgggcgttaagtttaaagaactgctcagccatgggggctcacctggtggttatc

SEQ ID NO: 492 - DNA, 310 bp, Homo sapiens
attcattctccctgaatcttaccaacaaaacactcctgaggagaaagaaagagagggagggagagaaaaagagagagagagaaacaaaaaaccaaagagagagaaaaaatgaattcatctaaatcatctgaaacacaatgcacagagagaggatgcttctcttcccaaatgttcttatggactgttgctgggatccccatcctatttctcagtgcctgtttcatcaccagatgtgttgtgacatttcgcatctttcaaacctgtgatgagaaaaagtttcagctacctgagaatttcacagagctctcct

SEQ ID NO: 493 - DNA, 57 bp, Homo sapiens
cccaaatgttcttatggactgttgctgggatccccatcctatttctcagtgcctgtt

SEQ ID NO: 494 - DNA, 500 bp, Homo sapiens
aaacctgtgatgagaaaaagtttcagctacctgagaatttcacagagctctcctgctacaattatggatcaggttcagtcaagaattgttgtccattgaactgggaatattttcaatccagctgctacttcttttctactgacaccatttcctgggcgttaagtttaaagaactgctcagccatgggggctcacctggtggttatcaactcacaggaggagcaggaattcctttcctacaagaaacctaaaatgagagagttttttattggactgtcagaccaggttgtcgagggtcagtggcaatgggtggacggcacacctttgacaaagtctctgagcttctgggatgtaggggagcccaacaacatagctaccctggaggactgtgccaccatgagagactcttcaaacccaaggcaaaattggaatgatgtaacctgtttcctcaattattttcggatttgtgaaatggtaggaataaatcctttgaacaaagga

SEQ ID NO: 495 - DNA, 505 bp, Homo sapiens
tcggagctgaacttcctaaaagacaaagtgtttatctttcaagattcattctccctgaatcttaccaacaaaacactcctgaggagaaagaaagagagggagggagagaaaaagagagagagagaaacaaaaaaccaaagagagagaaaaaatgaattcatctaaatcatctgaaacacaatgcacagagagaggatgcttctcttcccaaatgttcttatggactgttgctgggatccccatcctatttctcagtgcctgtttcatcaccagatgtgttgtgacatttcgcatctttcaaacctgtgatgagaaaaagtttcagctacctgagaatttcacagagctctcctgctacaattatggatcaggttcagtcaagaattgttgtccattgaactgggaatattttcaatccagctgctacttcttttctactgacaccatttcctgggcgttaagtttaaagaactgctcagccatgggggctcacctggtggttatc

SEQ ID NO: 496 - DNA, 194 bp, Homo sapiens
cagatgaagggttaatagaggacttgactatagaagacaaagcagtggagcaactggcagaaggattgctttctcattatttgccagatctgcagagatcaaaacaagccctccaggaactcacacagaaccaagttgtattgttagacacactggaacaagagatttcaaaatttaaagaatgtcattctatg

SEQ ID NO: 497 - DNA, 495 bp, Homo sapiens
tccaagggtatcctggatgattcgccaaaggaaatagcaaagtttatcttctgtacaagaacactaaattggaaaaaactgagaatctatcttgatgaaaggagagatgtcttggatgaccttgtaacattgcataattttagaaatcagttcttgccaaatgcactgagagaattttttcgtcatatccatgcccctgaagagcgtggagagtatcttgaaactcttataacaaagttctcacatagattctgtgcttgcaaccctgatttaatgcgagaacttggccttagtcctgatgctgtctatgtactgtgctactctttgattctactttccattgacctcactagccctcatgtgaagaataaaatgtcaaaaagggaatttattcgaaatacccgtcgcgctgctcaaaatattagtgaagattttgtagggcatctttatgacaatatctaccttattggccatgtggctgcataaaaagcacaa

SEQ ID NO: 498 - DNA, 161 bp, Homo sapiens
ccttgtaacattgcataattttagaaatcagttcttgccaaatgcactgagagaattttttcgtcatatccatgcccctgaagagcgtggagagtatcttgaaactcttataacaaagttctcacatagattctgtgcttgcaaccctgatttaatgcgag

SEQ ID NO: 499 - DNA, 36 bp, Homo sapiens
aaggacctggagtagttggtgaatttccaatcatca

SEQ ID NO: 500 - DNA, 36 bp, Homo sapiens
tggcttgcagctccacaggcctacgtgagtgaaaaa

SEQ ID NO: 501 - DNA, 58 bp, Homo sapiens
gctgggcgaagccgatgaagcggagttgcagcgcctggtggccgccgagcagcagaag

SEQ ID NO: 502 - DNA, 36 bp, Homo sapiens
tgctgcagcatgcggaaggtggcaaactgtggtcat

SEQ ID NO: 503 - DNA, 36 bp, Homo sapiens
tatgatgatgagtatgtggtgagtcttcccagcata

SEQ ID NO: 504 - DNA, 476 bp, Homo sapiens
tgttttatcatgtgtatttcagcaggtcttcttgaaatttaactaaaaatatgactgctctctcttcagagaactgctcttttcagtaccagttacgtcaaacaaaccagcccctagacgttaactatctgctattcttgatcatacttgggaaaatattattaaatatccttacactaggaatgagaagaaaaaacacctgtcaaaattttatggaatatttttgcatttcactagcattcgttgatcttttacttttggtaaacatttccattatattgtatttcagggattttgtacttttaagcattaggttcactaaataccacatctgcctatttactcaaattatttcctttacttatggctttttgcattatccagttttcctgacagcttgtatagattattgcctgaatttctctaaaacaaccaagctttcatttaagtgtcaaaaattattttatttctttaca

SEQ ID NO: 505 - DNA, 36 bp, Homo sapiens
tagattccagctgagcacgagtatagcagcattaac

SEQ ID NO: 506 - DNA, 500 bp, Homo sapiens
gctagcccaaggcacaagatgaaaattattaagtcgctacagaagaacggttcagttgtagccatgacaggagatggagtaaatgatgcagttgctctgaaggctgcagacattggagttgcgatgggccagactggtacagatgtttgcaaagaggcagcagacatgatcctagtggatgatgattttcaaaccataatgtctgcaatcgaagagggtaaagggatttataataacattaaaaatttcgttagattccagctgagcacgagtatagcagcattaactttaatctcattggctacattaatgaactttcctaatcctctcaatgccatgcagattttgtggatcaatattattatggatggacccccagctcagagccttggagtagaaccagtggataaagatgtcattcgtaaacctcctcgcaactggaaagacagcattttgactaaaaacttgatacttaaaatacttgtttcatcaataatcat

SEQ ID NO: 507 - DNA, 500 bp, Homo sapiens
tcagttgtagccatgacaggagatggagtaaatgatgcagttgctctgaaggctgcagacattggagttgcgatgggccagactggtacagatgtttgcaaagaggcagcagacatgatcctagtggatgatgattttcaaaccataatgtctgcaatcgaagagggtaaagggatttataataacattaaaaatttcgttagattccagctgagcacgagtatagcagcattaactttaatctcattggctacattaatgaactttcctaatcctctcaatgccatgcagattttgtggatcaatattattatggatggacccccagctcagagccttggagtagaaccagtggataaagatgtcattcgtaaacctcctcgcaactggaaagacagcattttgactaaaaacttgatacttaaaatacttgtttcatcaataatcattgtttgtgggactttgtttgtcttctggcgtgagctacgagacaatgtgat

SEQ ID NO: 508 - DNA, 500 bp, Homo sapiens
aaggcacgcatgggctcagcgggactcagagttcttgctttggcttctggtcctgaactgggacagctgacatttcttggcttggtgggaatcattgatccacctagaactggtgtgaaagaagctgttacaacactcattgcctcaggagtatcaataaaaatgattactggagattcacaggagactgcagttgcaatcgccagtcgtctgggattgtattccaaaacttcccagtcagtctcaggagaagaaatagatgcaatggatgttcagcagctttcacaaatagtaccaaaggttgcagtattttacagagctagcccaaggcacaagatgaaaattattaagtcgctacagaagaacggttcagttgtagccatgacaggagatggagtaaatgatgcagttgctctgaaggctgcagacattggagttgcgatgggccagactggtacagatgtttgcaaagaggcagcagacatgatcctagtggatga

SEQ ID NO: 509 - DNA, 75 bp, Homo sapiens
gccatgctggccgacttcatcgattgtccccctgatgatgagaagccaccacctcccacagagcctgactcctag

SEQ ID NO: 510 - DNA, 91 bp, Homo sapiens
gttattcatgtgaagatccttggaattttggctcttattgatgaaggtgaaacagattggaaattaattgctatcaatgcgaatgatcctg

SEQ ID NO: 511 - DNA, 500 bp, Homo sapiens
gtcactctctccaagtccgcatcggaggcttctccacagagcttacctcatactccaacgaccccaaccgcccccctgactcccgtcacccaaggcccctctgtcatcacaaccaccagcatgcacacggtgggacccatccgcaggcggtactcagacaaatacaacgtgcccatttcgtcagcagatattgcgcagaaccaagaattttataagaacgcagaagttagaccaccatttacatatgcatctttaattaggcaggccattctcgaatctccagaaaagcagctaacactaaatgagatctataactggttcacacgaatgtttgcttacttccgacgcaacgcggccacgtggaagaatgcagtgcgtcataatcttagtcttcacaagtgttttgtgcgagtagaaaacgttaaaggggcagtatggacagtggatgaagtagaattccaaaaacgaaggccacaaaagatcagtggtaacccttccct

SEQ ID NO: 512 - DNA, 36 bp, Homo sapiens
tctttcgcgtggtgccgcagtttgtagtgttttatc

SEQ ID NO: 513 - DNA, 46 bp, Homo sapiens
agagttaaagaaaagcagacattgacagtttctgatgagcataaac

SEQ ID NO: 514 - DNA, 80 bp, Homo sapiens
agactgtggagcgtattcatgtgggcaaaaaatacggtgatattcctcgagggatttttgtggtcagaggagaaaatgtg

SEQ ID NO: 515 - DNA, 75 bp, Homo sapiens
gtagaggagcccctggatcttatcaggctcagcctagatgagcgaatttatgtgaaaatgagaaatgaccgagag

SEQ ID NO: 516 - DNA, 62 bp, Homo sapiens
agaatccatcaccccggattgtgaaaacacatctaccgactgatcttcttcctaaatctttc

SEQ ID NO: 517 - DNA, 500 bp, Homo sapiens
ggttttggagatactatatgagtttcctagagtttttagttctgtcatgaaacctgagaatatgattgtaccaataaaactaagctctgattctgaaattgtacaacaaagcatgcaaacatcagatggaatattgaatcccagcagcggaggcatcaccactacttctgttcctggaagtccagatggtgtctttgatcaaacttgcgtagattttgaagttgagagtgtaggtggtatagccaatagtacaggtttcatcttagatcaaaaagatacagattccattcctgcaactatgggtcacatctctctgtcagagagcacaaatgacactgttagtccagtaatgattagagaatgtgagaagaatgacagcactgctgatgagttacatgtaaagcacgaacctcctgatacagctgtccttgctcatgaaacacatagagatagtggatttaagaatgtaggtgacattaccaataaagcatgtatgatgg

SEQ ID NO: 518 - DNA, 36 bp, Homo sapiens
ctcacgggagcaagaacggtgcctcgagtctttatt

SEQ ID NO: 519 - DNA, 36 bp, Homo sapiens
tctttttttcttctccagaacaccttccaccatgac

SEQ ID NO: 520 - DNA, 135 bp, Homo sapiens
attcttaaaggcgcccgagtgtaggcgacaggccgctgacggccggaaggaaaatgagtgagtctttggttgtttgtgatgttgccgaagatttagtggaaaagctgagaaagtttcgttttcgcaaagaaacga

SEQ ID NO: 521 - DNA, 61 bp, Homo sapiens
tgtgatgttgccgaagatttagtggaaaagctgagaaagtttcgttttcgcaaagaaacga

SEQ ID NO: 522 - DNA, 142 bp, Homo sapiens
tgtgagtgagtccgggcccgtgtcccctctcccgccgccgccatgggctgcacgttgagcgccgaagacaaggcggcagtggagcgaagcaagatgatcgaccgcaacttacgggaggacggggaaaaagcggccaaagaag

SEQ ID NO: 523 - DNA, 36 bp, Homo sapiens
taattatttttggcacaggaaaagagtcaatcagaa

SEQ ID NO: 524 - DNA, 36 bp, Homo sapiens
caggacctcgggccatggttcattatgctgacatat

SEQ ID NO: 525 - DNA, 500 bp, Homo sapiens
agctcctggaaaatatgaataaactcaccagcttgaagtatcttgaaatgaaagatattgctataaacattagtaggaacttaaaggacttaaaccagaaatatgctggactgcagccttatctggatcagatcaatgtcattgaagagcaggtagcagctcttgagcaggcagcttacaagttggatgcatattcaaaaaaactggaagccaagtacaagaagctggagaagcgatgagaaacttatttctatgggacagagtcttttttttttaatgtggaagaatgtcttataaaacctgaatcctgaggctgatgaattgtgaaaattcctcaaaaggaaattatgctggtcatcacaggaacatctcaacgttcgagtaaactggaggactgtggctattcctgaaccttctttgagacagaatccctcagaatctcacacttataacttcctaccttttacttgaatgctttgccatattcaggacagagactc

SEQ ID NO: 526 - DNA, 497 bp, Homo sapiens
ggttggacccgtgcggatccaggaaaacagcgatcgaggtaaaagtaatggctgccgtcgtctgcccagcgcgcaattgtgagtgaccttcaccgctagcgcgcgccacccaccccacatgaacctgtagggttatgcccagtctacagacgaggaaaccaagatccagggaagctgagtcaccggcagagctgggattacgtctaagatttgtccagggggcgagaactgcagcgacaccatgatttatcatctccagaaaacaaaaaaaaaggcctagacacataaaaatggcttctctgtagagtgagctcaacgagctcaatgtgattccagttaaggaattgggccttaagccaaatgcgcctaaacgcaacttgcctctctattatttatccagaggatgaatttaattcctacgtacatgcgcccacatctcgtcagctggtgcctcagagaaatgcgctgacaaatcttaaaggtggggcttcatgaca

SEQ ID NO: 527 - DNA, 387 bp, Homo sapiens
tcttgccgtgccgatagcgctcacgcaagcatggttaacgtccctaaaacccaccagactttctgtaagaagtgtggcaagcaccaaccccacaaagtgacacagtacaagaagggcaaggattctctgtatgcccagggaaagtggcgttataacaggaagcagagtggctatggtgggcagactaagccgattttccagaaaaaggctaaaactacaaagaatactgtgctaaggcttgagtgcgttgagcccaactgcagatccaagagaatgctggctattaaaagatgcaagcattttgaactgggaggagataagaagagaaagggccaagtgatcccgttctaagtgtcatcttttattatgaagacaataaaaatctca

SEQ ID NO: 528 - DNA, 46 bp, Homo sapiens
aaggaatgtggaaaggtttttagtcttcccacccagcttaatcgcc

SEQ ID NO: 529 - DNA, 36 bp, Homo sapiens
tgcacacaagccgtctgagtatcaggaatatggaca

SEQ ID NO: 530 - DNA, 186 bp, Homo sapiens
agttgatgaaaatacagaagaaaatcattgtggagaaacttctagccagattccagatgacacactgaacaaaaaaacttctcctggagtaaaatcatgtgaaagcagtgtgtgtggagaagtcttcgtgggtcattcttcccttaataggcacattagagctgacactgcacacaagccgtctga

SEQ ID NO: 531 - DNA, 139 bp, Homo sapiens
gtacttggcaacacaggggattgttatacctccagctactgaaaaacacaatcttattcagcatgcaaaagattactggcaaaagcaaccacaactgaaattgaaggaaacgccagagccagttacaaagacagaggac

SEQ ID NO: 532 - DNA, 73 bp, Homo sapiens
agatggtttaaagcttgaaactgaattactggatggaaaaaccaagctaatattgtctccatatgaacataaa

SEQ ID NO: 533 - DNA, 47 bp, Homo sapiens
agatggtttaaagcttgaaactgaattactggatggaaaaaccaagc

SEQ ID NO: 534 - DNA, 145 bp, Homo sapiens
gtagcgcttgctgagcggcggcggcaaccgacgtacacaaggggcttgagcgttctgtggagagagtgcgagagatggtttaaagcttgaaactgaattactggatggaaaaaccaagctaatattgtctccatatgaacataaa

SEQ ID NO: 535 - DNA, 26 bp, Homo sapiens
aatgaatgagacatagtcctacaggt

SEQ ID NO: 536 - DNA, 216 bp, Homo sapiens
aagttaatggaaatatttgtaactttatgaccacaaataattttaacttgtctaagtgcctaagacaagtctgattacatgaagctaaagaataatgcacaaaaagtagaacagagaaatgctacggtaaatgcctgagaaacgcacaataacaaggtggggaaatataacaatacacttatggaagacatcactgtaaaggaaaaaaaaaaaaaa

SEQ ID NO: 537 - DNA, 174 bp, Homo sapiens
tcagagcaggctgtaaaaaatgtggctaccctggtcacctgacttttgaatgccgcaattttctccgagtagaccctaaaagggacatagttttggatgtcagcagtacaagtagtgaagatagcgatgaagagaatgaagaactgaataaattgcaggcattacaggaaaaaa

SEQ ID NO: 538 - DNA, 339 bp, Homo sapiens
agaggcgtacaggcccttcccgaccgtagcgagggtgctgctgcgctgggggaaggaaaacgccgctttgactgtgccttgttctcacagctggcgggaagcaagcgccttttcgaaagccagaggctcgagttacccctcttaccaccgtcatggcagtcccaggttgcaacaaggacagtgtcagagcaggctgtaaaaaatgtggctaccctggtcacctgacttttgaatgccgcaattttctccgagtagaccctaaaagggacatagttttggatgtcagcagtacaagtagtgaagatagcgatgaagagaatgaagaactgaataaattgc

SEQ ID NO: 539 - DNA, 500 bp, Homo sapiens
gagaagctgacggaacagaaggagtggatgaagatataattgtgacccaaagtcagaccaacttcacctgccccattacaaaggaggaaatgaagaagccagtgaaaaataaagtgtgtggccacacctatgaagaggacgccattgttcgcatgattgagtccaggcaaaagcggaagaaaaaggcctattgccctcaaattggctgtagccacacggatataagaaagtcagatcttatccaggatgaagcacttagaagggcaattgagaaccataacaagaaaagacatcgtcattccgagtaggaaaagccacctgcctgcagggacaccagcagcctacctcctaccccagctgtctgttgagagcagtgctgaccccagcagttagggactggctgcatagcatacttgttgggggtaaaacttgttgcttttatgtgtgcttgaaaacatttttcaaagttacacaacagaaatgcaatcatattgtttatt

SEQ ID NO: 540 - DNA, 500 bp, Homo sapiens
tgccaggacgttccagttcaaattcaggttcaactggtttcatctccttcagtggtgtagagtctgctctctcctccttgaaaaacttccaagcctgtatcaactctggtatggacacagcttctagtgttgctttggatcttgtggaaagtcagactgaagtgagtagtgaatatagtatggacaaggcaatggttgaatttgctacattggatcggcaactaaaccattatgtaaaggctgttcaatctacaataaatcatgtgaaagaagaacgtccagaaaaaataccagatttaaaattattggtagagaagaaatttttggctttacagagcaagaattctgatgcagactttcaaaataatgaaaaatttgtacagtttaaacaacagctgaaagaactaaagaagcaatgtggtcttcaagctgacagagaagctgacggaacagaaggagtggatgaagatataattgtgacccaaagtcagaccaacttc

SEQ ID NO: 541 - DNA, 500 bp, Homo sapiens
atattatttttggtatttggaattgaatttgccaggaatgcaagcactgctacctaactaaagaccttggctttggaaacatcttaccccttggcagctctccagagtttagacttggcagcatcaaagacacaacgcaaggtgtgtttatttgatttaacattttgcaaaaggtgttttgatttgtggtttgttttctttcactttgtacttattgctttgggttgtttttttctggcaatgaacctgggttccaagcataggtttttcttatggaaggcagttttacaataaggaaatgtttttacttgtatttattttgtgatatttcagcaaatccaaataaatgtagtaacatttataaagctatacatttataactgatttatttgttaaatatttagtattatcaattgtctgttaaagatttgttgctacattaaatgcttggtctgtcttgatgttcagtacattattatactttggtatattgcaatatt

SEQ ID NO: 542 - DNA, 38 bp, Homo sapiens
cttaaactttgatgctgtccggcgacgtatgagtgtaa

SEQ ID NO: 543 - DNA, 133 bp, Homo sapiens
aaaagaagaactggaccacttaactttgtgacttgtatgagagagaccctggaaaaacattatggaaataagcctataggaatgggaggtactttcataattcagaagggaaaagtgaagtctcacattatgg

SEQ ID NO: 544 - DNA, 409 bp, Homo sapiens
ctgactaacgtgggcggagctctagctcgcgtatcctgaggaggcggggttggcctaggcgaagatccggactctgggtgttttgctaccgtgaccgtttagaacagaaactgttcatacttggtgcgctgtggactcttgtgataattaaccaagagtagctctatttgtccaacctcacacctaaagaagaaagaaaatggcttgtgctgagttttcttttcatgtaccaagtcttgaagagcttgctggagttatgcagaaggggttaaaagataactttgctgatgtccaggtctctgtagttgattgccctgatttgactaaggaaccctttacctttcctgtaaaaggcatctgtgggaaaactagaattgcagaagttggaggtgtgccttacttattgcct

SEQ ID NO: 545 - DNA, 131 bp, Homo sapiens
tgcttagaagcagattctaaaagcagtttctcttcagaacatcttttttcataccacttgataagcatcttgaaacaccatggctgtagctgcagtaaaatgggtgatgtcaaagagaactatcttgaaac

SEQ ID NO: 546 - DNA, 498 bp, Homo sapiens
atggagctttatattgtgtttgtcataaatctacgtattctcctctaccagatgactataattgcaacgtagagcttgctctgacttctgatggcaggacaatagtatgctaccacccttctgtggacattccatatgaacacacaaaacctatccctcggccagatcctgtgcataataatgaagaaacacatgatcaagtgctgaaaaccagattggaagaaaaagttgaacaccttgaggaaggacctatgatagaacaacttagcaaaatgttctttactactaagcaccgttggtatcctcatggacggtatcacagatgtcgtaagaatctgaatcctccaaaagacagatgatgcggaggttcctgggggaatcaaagagaaatgtgcctcatttgccatttgagaaaatgcagtctggtgtattcagtaatatatagtaaagtaataatgataaaatatcttttcatatattagaatgtgtacttttata

SEQ ID NO: 547 - DNA, 500 bp, Homo sapiens
gaacatggagatctgcaagcgtcgggtgaatatgtatgacacggtgaaccagagcaaaacccctttcatcacgcacgtggcccccagcacgtccaccaacctgaccatgacctttaacaaccagctgaccactgtccacaaccaggctccctcctctaccagtgccactatttccttagccaatcccgaagtctccatactaaactacccatctacactctaccagccctcagcggcatccatggctgcagtggcccagcggagcatgcccctgcagacaggaacagcccagatttgtgcccggcctgacccgttccagcaagctctcatcgtgtgtccccccggcttccaaggcttgcaggcctctccctctaagcacgctggctactcggtgcgaatggaaaatgcagttcccatcgtcactcaagccccaggagctcagcctcttcagatccaaccaggtctgcttgcccagcaggcttggccaagtgggacccagc

SEQ ID NO: 548 - DNA, 500 bp, Homo sapiens
gtaataaagcaaccaatggacctttcatctgtaatcagtaaaattgatctacacaagtatctgactgtgaaagactatttgagagatattgatctaatctgtagtaatgccttagaatacaatccagatagagatcctggagatcgtcttattaggcatagagcctgtgctttaagagatactgcctatgccataattaaagaagaacttgatgaagactttgagcagctctgtgaagaaattcaggaatctagaaagaaaagaggttgtagctcctccaaatatgccccgtcttactaccatgtgatgccaaagcaaaattccactcttgttggtgataaaagatcagacccagagcagaatgaaaagctaaagacaccgagtactcctgtggcttgcagcactcctgctcagttgaagaggaaaattcgcaaaaagtcaaactggtacttaggcaccataaaaaagcgaaggaagatttcacaggcaaaggatgatag

SEQ ID NO: 549 - DNA, 36 bp, Homo sapiens
gctggagaggaaaaccaggtaagtggcttcttttta

SEQ ID NO: 550 - DNA, 265 bp, Homo sapiens
gacggaaggagcggcggcgacggaggaggaggatggaggcggtggtgttcgtcttctctctcctcgattgttgcgcgctcatcttcctctcggtctacttcataattacattgtctgatttagaatgtgattacattaatgctagatcatgttgctcaaaattaaacaagtgggtaattccagaattgattggccataccattgtcactgtattactgctcatgtcattgcactggttcatcttccttctcaacttacctgttgc

SEQ ID NO: 551 - DNA, 77 bp, Homo sapiens
attggccataccattgtcactgtattactgctcatgtcattgcactggttcatcttccttctcaacttacctgttgc

SEQ ID NO: 552 - DNA, 130 bp, Homo sapiens
aaaggaggatttgaacagaaaatgagtaggcgagaagctggtcttattttaggtgtaagcccatctgctggcaaggctaagattagaacagctcataggagagtcatgattttgaatcacccagataaag

SEQ ID NO: 553 - DNA, 500 bp, Homo sapiens
gtacttattatggaattttgtccatgtgggagtttatacactgttttagaagaaccttctaatgcctatggactaccagaatctgaattcttaattgttttgcgagatgtggtgggtggaatgaatcatctacgagagaatggtatagtgcaccgtgatatcaagccaggaaatatcatgcgtgttataggggaagatggacagtctgtgtacaaactcacagattttggtgcagctagagaattagaagatgatgagcagtttgtttctctgtatggcacagaagaatatttgcaccctgatatgtatgagagagcagtgctaagaaaagatcatcagaagaaatatggagcaacagttgatctttggagcattggggtaacattttaccatgcagctactggatcactgccatttagaccctttgaagggcctcgtaggaataaagaagtgatgtataaaataattacaggaaagccttctggtgcaatatctggagt

SEQ ID NO: 554 - DNA, 500 bp, Homo sapiens
ctcaatcacaaaaatattgtcaaattatttgctattgaagaggagacaacaacaagacataaagtacttattatggaattttgtccatgtgggagtttatacactgttttagaagaaccttctaatgcctatggactaccagaatctgaattcttaattgttttgcgagatgtggtgggtggaatgaatcatctacgagagaatggtatagtgcaccgtgatatcaagccaggaaatatcatgcgtgttataggggaagatggacagtctgtgtacaaactcacagattttggtgcagctagagaattagaagatgatgagcagtttgtttctctgtatggcacagaagaatatttgcaccctgatatgtatgagagagcagtgctaagaaaagatcatcagaagaaatatggagcaacagttgatctttggagcattggggtaacattttaccatgcagctactggatcactgccatttagaccctttgaagggcctcg

SEQ ID NO: 555 - DNA, 56 bp, Homo sapiens
tgttatgcctgcagaattgccagtaccttactgctttatcaggaattaatgcgaaa

SEQ ID NO: 556 - DNA, 43 bp, Homo sapiens
gatcaacctggaagcggcagagttaggtgaaatttcagacata

SEQ ID NO: 557 - DNA, 167 bp, Homo sapiens
cgtggccatgcagccttcacgagtgatcccaagcccacaatagaggtcagtgggaaaaagtacaccgccccacacatcctgatcgccacaggtggtatgccctccacccctcatgagagccagatccccggtgccagcttaggaataaccagcgatggattttttca

SEQ ID NO: 558 - DNA, 98 bp, Homo sapiens
tgggatctgaatggcgaactttcagcaatgacaaagcaacaaaagatccatctcgagttggagattctcagaatcctcttctgagtgatggagatttg

SEQ ID NO: 559 - DNA, 460 bp, Homo sapiens
tatatttaaagttggagttcgttgctaaagatggcagacccagatgtcctcactgaagttccagcagcattgaagcggttagccaagtatgtgatccggggattttatggcattgagcatgccttggccttggacatcttgatcaggaactcctgtgtgaaagaggaggatatgctggagctgctcaagtttgatcggaagcaacttcgatcagttttgaataatttaaagggagacaagtttatcaaatgcagaatgagggtagagactgctgcagacgggaaaaccactcgccataactactacttcatcaattatcgtactcttgttaatgtggtaaaatataaactggaccacatgagaagaagaattgagaccgatgagagagattcgaccaaccgggcttccttcaaatgtcctgtctgtagtagtactttcacagacttagaagctaatcagc

SEQ ID NO: 560 - DNA, 134 bp, Homo sapiens
gttgagagaaagggagctgttcaaaaaacgagctctttctactcctgtagtagaaaaacgttcagcatcttctgagtcatcatcatcatcgtcaaagaagaagaaaacaaaggtagaacatggaggatcgtcag

SEQ ID NO: 561 - DNA, 36 bp, Homo sapiens
ttactgagagctcatcagataagctgtcattggaag

SEQ ID NO: 562 - DNA, 484 bp, Homo sapiens
ggaacgccgctcttcgcctctcagcgcggcttgtcctttgttccggacgcccgctcctcagccctgcgtcctggggtcgctgctgcatcccgcacgcctccaccggctgcagacccatggccgagcgcggggaactcgacttgaccggcgccaaacagaacacaggagtgtggctagtcaaggttcctaaatatttgtcacagcaatgggctaaagcctctggaagaggtgaagttgggaaactgcggattgccaagactcaaggaaggactgaggtgtcatttactttgaatgaggatcttgcaaatattcatgatattggtggaaaaccagcttcagtcagtgctcctagagaacatccatttgtcttgcaaagtgttggaggacagacattaacagtatttactgagagctcatcagataagctgtcattggaaggaatagtggtacaaagagctgaatgccgaccagctgccagtgaaaa

SEQ ID NO: 563 - DNA, 26 bp, Homo sapiens
taagctgtcattggaaggaatagtgg

SEQ ID NO: 564 - DNA, 36 bp, Homo sapiens
agctatgcagactctaaaacacatgcctggacatac

SEQ ID NO: 565 - DNA, 243 bp, Homo sapiens
aatcaactgagagaaattacggggattaatgacacccagatactacagcaagccttgaaggatagtaatggaaacttggaattagcagtggctttccttactgcgaagaatgctaagacccctcagcaggaggagacaacttactaccaaacagcacttcctggcaatgatagatacatcagtgtgggaagccaagcagatacaaatgtgattgatctcactggagatgataaagatgatctt

SEQ ID NO: 566 - DNA, 500 bp, Homo sapiens
cagaatatctagagcagccatcaagaagtgatttctcaaagcacttgaaagaagaaactattcaaataattaccaaggcatcacatgagcatgaagataaaagtcctgaaacagttttgcagtcggcaattaagttggaatatgcaaggttggttaagttggcccaagaagacaccccaccagaaaccgattatcgtttacatcatgtagtggtctactttatccagaaccaggcaccaaagaaaattattgagaaaacattactagaacaatttggagatagaaatttgagttttgatgaaaggtgtcacaacataatgaaagttgctcaagccaaactggaaatgataaaacctgaagaagtaaacttggaggaatatgaggagtggcatcaggattataggaaattcagggaaacaactatgtatctcataattgggctagaaaattttcaaagagaaagttatatagattccttgctgttcctcatctgtgcttat

SEQ ID NO: 567 - DNA, 255 bp, Homo sapiens
caacaaggcagaaattatattgttgaagatggagatattatcttcttcaaatttaacacacctcaacaaccgaagaagaaataaaatttagttattgctcagataaacatacaacttccaaaaggcatctgatttttaaaaaattaaaatttctgaaaaccaatgcgacaaataaagttggggagatgggaatctttgacaaacaaattatttttatttgttttaaaattaaaatactgtgtacccccccccccc

SEQ ID NO: 568 - DNA, 478 bp, Homo sapiens
atatcacgcacgttgaaggaagtgtagatcctattcgagatatagaaataatacatgaagagcttcagcttaaagatgaggaaatgattgggcccattatagataaactagaaaaggtggctgtgagaggaggagataaaaaactaaaacctgaatatgatataatgtgcaaagtaaaatcctgggttatagatcaaaagaaacctgttcgcttctatcatgattggaatgacaaagagattgaagtgttgaataaacacttatttttgacttcaaaaccaatggtctacttggttaatctttctgaaaaagactacattagaaagaaaaacaaatggttgataaaaattaaagagtgggtggacaagtatgacccaggtgctttggtcattccttttagtggggccttggaactcaagttgcaagaattgagtgctgaggagagacagaagtatctggaagcgaacatgacacaaag

SEQ ID NO: 569 - DNA, 61 bp, Homo sapiens
taaggctgggtttgcagcactccaactagaatactttttcactgcaggcccagatgaagtg

SEQ ID NO: 570 - DNA, 67 bp, Homo sapiens
attttatcttccaggcaaggacatttggaccgatcttttacatgttccacaagaagtgcagcttata

SEQ ID NO: 571 - DNA, 366 bp, Homo sapiens
ttggaaccggcggcgttgcgtctaaaaaggcgaaagccttgaggttgaaggtgggacgagcctaatgaagtggttaatgttcgtgaagaaattgaagagttttttccaagaatgtggaagataaatcaagataaaagaaggctaatgaaaagtattaaagatcagaaaattaaaattgaatgggggaaaaaattgaacagaagattggtcagatagaagcacttgaatatttttttaaggctattttgaattgtttgaattggggaagaatacacgaagtatgaaaaatgaaaaactcaatgaagaatgaagagaagtagaaagcaagagtgaagtagaattaaaagaatctggaagaatgaatgg

SEQ ID NO: 572 - DNA, 258 bp, Homo sapiens
ctcagcttcagacttcagcacaggtgccaagtggtgaggaaataggcaagataaagaacggccacacaggtctgagcaatggaaatggaattcaccacggggccaaacacggatccgcagataatcgcaaactttcagcacctgtttctcaaaaaatgcatagaaaaattcagtccagcttgtctgtaaacagcgatatcagtaagaagagcaaagtaaatgctgtcttttcccaaaagacaggctcttcacctgaag

SEQ ID NO: 573 - DNA, 25 bp, Homo sapiens
tctgaagccatgaagctgacacagt

SEQ ID NO: 574 - DNA, 156 bp, Homo sapiens
tgcagtgtggctggctggggttatgtctcaatgagcactttagcaaccacactgcaggaagtgttgctgacagtgcagaaggactgccagtgtgaacgtctcttccatggcaattacagcagagccactgagatttgtgtgggggatccaaagaag

SEQ ID NO: 575 - DNA, 358 bp, Homo sapiens
gggggcccacaatatcaaggaacaggagcggacccagcagtttatccctgtgaaaagacccatcccccatccagcctataatcctaagaacttctccaacgacatcatgctactgcagctggagagaaaggccaagtggaccacagctgtgcggcctctcaggctacctagcagcaaggcccaggtgaagccagggcagctgtgcagtgtggctggctggggttatgtctcaatgagcactttagcaaccacactgcaggaagtgttgctgacagtgcagaaggactgccagtgtgaacgtctcttccatggcaattacagcagagccactgagatttgtgtgggggatccaaagaag

SEQ ID NO: 576 - DNA, 222 bp, Homo sapiens
tggaccacagctgtgcggcctctcaggctacctagcagcaaggcccaggtgaagccagggcagctgtgcagtgtggctggctggggttatgtctcaatgagcactttagcaaccacactgcaggaagtgttgctgacagtgcagaaggactgccagtgtgaacgtctcttccatggcaattacagcagagccactgagatttgtgtgggggatccaaagaag

SEQ ID NO: 577 - DNA, 500 bp, Homo sapiens
gggggcccacaatatcaaggaacaggagcggacccagcagtttatccctgtgaaaagacccatcccccatccagcctataatcctaagaacttctccaacgacatcatgctactgcagctggagagaaaggccaagtggaccacagctgtgcggcctctcaggctacctagcagcaaggcccaggtgaagccagggcagctgtgcagtgtggctggctggggttatgtctcaatgagcactttagcaaccacactgcaggaagtgttgctgacagtgcagaaggactgccagtgtgaacgtctcttccatggcaattacagcagagccactgagatttgtgtgggggatccaaagaagacacagaccggtttcaagggggactccggggggcccctcgtgtgtaaggacgtagcccaaggtattctctcctatggaaacaaaaaagggacacctccaggagtctacatcaaggtctcacacttcctgccctggataaaga

SEQ ID NO: 578 - DNA, 100 bp, Homo sapiens
gggggcccacaatatcaaggaacaggagcggacccagcagtttatccctgtgaaaagacccatcccccatccagcctataatcctaagaacttctccaac

SEQ ID NO: 579 - DNA, 36 bp, Homo sapiens
attgacttctcagcccaggtgagagcctaacgagga

SEQ ID NO: 580 - DNA, 36 bp, Homo sapiens
ctgcatcgagccttgaaggttggtctggaaagttca

SEQ ID NO: 581 - DNA, 36 bp, Homo sapiens
acttactgttggccatagttaattgtgtgaggaaca

SEQ ID NO: 582 - DNA, 213 bp, Homo sapiens
gagaacagatggggcacggatgaagacaaattcactgagatcctgtgtttaaggagctttcctcaattaaaactaacatttgatgaatacagaaatatcagccaaaaggacattgtggacagcataaaaggagaattatctgggcattttgaagacttactgttggccatagttaattgtgtgaggaacacgccggcctttttagccgaaaga

SEQ ID NO: 583 - DNA, 58 bp, Homo sapiens
gagaacagatggggcacggatgaagacaaattcactgagatcctgtgtttaaggagct

SEQ ID NO: 584 - DNA, 60 bp, Homo sapiens
atatcagccaaaaggacattgtggacagcataaaaggagaattatctgggcattttgaag

SEQ ID NO: 585 - DNA, 36 bp, Homo sapiens
cccgtgggtcgcggcgatcctcccacatgtcatcag

SEQ ID NO: 586 - DNA, 263 bp, Homo sapiens
ggaggcggcaaaaaaaaagtctgctactactacgacggtgatattggaaattattattatggacagggtcatcccatgaagcctcatagaatccgcatgacccataacttgctgttaaattatggcttatacagaaaaatggaaatatataggccccataaagccactgccgaagaaatgacaaaatatcacagtgatgagtatatcaaatttctacggtcaataagaccagataacatgtctgagtatagtaagcagatgca

SEQ ID NO: 587 - DNA, 500 bp, Homo sapiens
aatagatgtacacttagttcctgatcgcaagaaagaccagtataaagttggagaggtgttgaaattctcctgcaaaccaggatttacaatagttggacctaattccgttcagtgctaccactttggattgtctcctgacctcccaatatgtaaagagcaagtacaatcatgtggtccacctcctgaactcctcaatgggaatgttaaggaaaaaacgaaagaagaatatggacacagtgaagtggtggaatattattgcaatcctagatttctaatgaagggacctaataaaattcaatgtgttgatggagagtggacaactttaccagtgtgtattgtggaggagagtacctgtggagatatacctgaacttgaacatggctgggcccagctttcttcccctccttattactatggagattcagtggaattcaattgctcagaatcatttacaatgattggacacagatcaattacgtgtattcatggagtatggaccc

SEQ ID NO: 588 - DNA, 144 bp, Homo sapiens
gagatatacctgaacttgaacatggctgggcccagctttcttcccctccttattactatggagattcagtggaattcaattgctcagaatcatttacaatgattggacacagatcaattacgtgtattcatggagtatggaccc

SEQ ID NO: 589 - DNA, 42 bp, Homo sapiens
ctgggacaagccatcttgtaaaatgtgcggagaaggagaaaa

SEQ ID NO: 590 - DNA, 36 bp, Homo sapiens
atttttgaggatgaccggtgccttgctttccatgac

SEQ ID NO: 591 - DNA, 36 bp, Homo sapiens
ttcctgcccagggaagaccaccttttccgcaagttc

SEQ ID NO: 592 - DNA, 500 bp, Homo sapiens
tgctcacgaacagccctgtggaactgagagagcccaacgtcctcatctgtttcatagacaagttcaccccaccagtggtcaatgtcacgtggcttcgaaatggaaaacctgtcaccacaggagtgtcagagacagtcttcctgcccagggaagaccaccttttccgcaagttccactatctccccttcctgccctcaactgaggacgtttacgactgcagggtggagcactggggcttggatgagcctcttctcaagcactgggagtttgatgctccaagccctctcccagagactacagagaacgtggtgtgtgccctgggcctgactgtgggtctggtgggcatcattattgggaccatcttcatcatcaagggattgcgcaaaagcaatgcagcagaacgcagggggcctctgtaaggcacatggaggtgatggtgtttcttagagagaagatcactgaagaaacttctgctttaatggctttacaaagctggcaat

SEQ ID NO: 593 - DNA, 36 bp, Homo sapiens
tgctcagagaggtggaagaccatgtctgctaaagag

SEQ ID NO: 594 - DNA, 521 bp, Homo sapiens
gcaaaggagatcctaagaagccgagaggcaaaatgtcatcatatgcattttttgtgcaaacttgtcgggaggagcataagaagaagcacccagatgcttcagtcaacttctcagagttttctaagaagtgctcagagaggtggaagaccatgtctgctaaagagaaaggaaaatttgaagatatggcaaaagcggacaaggcccgttatgaaagagaaatgaaaacctatatccctcccaaaggggagacaaaaaagaagttcaaggatcccaatgcacccaagaggcctccttcggccttcttcctcttctgctctgagtatcgcccaaaaatcaaaggagaacatcctggcctgtccattggtgatgttgcgaagaaactgggagagatgtggaataacactgctgcagatgacaagcagccttatgaaaagaaggctgcgaagctgaaggaaaaatacgaaaaggatattgctgcatatcgagctaaaggaaagcctgatgcagcaaaaaagggagtt

SEQ ID NO: 595 - DNA, 449 bp, Homo sapiens
gcaaaggagatcctaagaagccgagaggcaaaatgtcatcatatgcattttttgtgcaaacttgtcgggaggagcataagaagaagcacccagatgcttcagtcaacttctcagagttttctaagaagtgctcagagaggtggaagaccatgtctgctaaagagaaaggaaaatttgaagatatggcaaaagcggacaaggcccgttatgaaagagaaatgaaaacctatatccctcccaaaggggagacaaaaaagaagttcaaggatcccaatgcacccaagaggcctccttcggccttcttcctcttctgctctgagtatcgcccaaaaatcaaaggagaacatcctggcctgtccattggtgatgttgcgaagaaactgggagagatgtggaataacactgctgcagatgacaagcagccttatgaaaagaaggctgcgaagctg

SEQ ID NO: 596 - DNA, 163 bp, Homo sapiens
aaaggaaaatttgaagatatggcaaaagcggacaaggcccgttatgaaagagaaatgaaaacctatatccctcccaaaggggagacaaaaaagaagttcaaggatcccaatgcacccaagaggcctccttcggccttcttcctcttctgctctgagtatcgcc

SEQ ID NO: 597 - DNA, 157 bp, Homo sapiens
ttcggccttcttcctcttctgctctgagtatcgcccaaaaatcaaaggagaacatcctggcctgtccattggtgatgttgcgaagaaactgggagagatgtggaataacactgctgcagatgacaagcagccttatgaaaagaaggctgcgaagctg

SEQ ID NO: 598 - DNA, 139 bp, Homo sapiens
ctgctctgagtatcgcccaaaaatcaaaggagaacatcctggcctgtccattggtgatgttgcgaagaaactgggagagatgtggaataacactgctgcagatgacaagcagccttatgaaaagaaggctgcgaagctg

SEQ ID NO: 599 - DNA, 373 bp, Homo sapiens
cagtacattgagctccatagagacagcgccggggcaagtgagagccggacgggcactgggcgactctgtgcctcgctgaggaaaaataactaaacatgggcaaaggagatcctaagaagccgagaggcaaaatgtcatcatatgcattttttgtgcaaacttgtcgggaggagcataagaagaagcacccagatgcttcagtcaacttctcagagttttctaagaagtgctcagagaggtggaagaccatgtctgctaaagagaaaggaaaatttgaagatatggcaaaagcggacaaggcccgttatgaaagagaaatgaaaacctatatccctcccaaaggggagacaaaaaagaagttcaaggatcccaa

SEQ ID NO: 600 - DNA, 36 bp, Homo sapiens
tacgccttcttcgtgcagacctgccgggaagagcac

SEQ ID NO: 601 - DNA, 25 bp, Homo sapiens
ggaagaaaaaggaccccaatgctcc

SEQ ID NO: 602 - DNA, 360 bp, Homo sapiens
ttgctctgaacatcgcccaaagatcaaaagtgaacaccctggcctatccattggggatactgcaaagaaattgggtgaaatgtggtctgagcagtcagccaaagataaacaaccatatgaacagaaagcagctaagctaaaggagaaatatgaaaaggatattgctgcatatcgtgccaagggcaaaagtgaagcaggaaagaagggccctggcaggccaacaggctcaaagaagaagaacgaaccagaagatgaggaggaggaggaggaagaagaagatgaagatgaggaggaagaggatgaagatgaagaataaatggctatcctttaatgatgcgtgtggaatgtgtgtgtgtgctc

SEQ ID NO: 603 - DNA, 139 bp, Homo sapiens
ttgctctgaacatcgcccaaagatcaaaagtgaacaccctggcctatccattggggatactgcaaagaaattgggtgaaatgtggtctgagcagtcagccaaagataaacaaccatatgaacagaaagcagctaagcta

SEQ ID NO: 604 - DNA, 269 bp, Homo sapiens
ttcacgagtatttccctgaaatgcagattctagccgttagtggtaactattgtactgacaagaaacctgctgctataaattggatagagggaagaggaaaatctgttgtttgtgaagctgtcattccagccaaggttgtcagagaagtattaaagactaccacagaggctatgattgaggtcaacattaacaagaatttagtgggctctgccatggctgggagcataggaggctacaacgcccatgcagcaaacattgtcaccgccatc

SEQ ID NO: 605 - DNA, 500 bp, Homo sapiens
tcaaaacttcacgagtatttccctgaaatgcagattctagccgttagtggtaactattgtactgacaagaaacctgctgctataaattggatagagggaagaggaaaatctgttgtttgtgaagctgtcattccagccaaggttgtcagagaagtattaaagactaccacagaggctatgattgaggtcaacattaacaagaatttagtgggctctgccatggctgggagcataggaggctacaacgcccatgcagcaaacattgtcaccgccatctacattgcctgtggacaggatgcagcacagaatgttggtagttcaaactgtattactttaatggaagcaagtggtcccacaaatgaagatttatatatcagctgcaccatgccatctatagagataggaacggtgggtggtgggaccaacctactacctcagcaagcctgtttgcagatgctaggtgttcaaggagcatgcaaagataatcctggggaaaatgc

SEQ ID NO: 606 - DNA, 500 bp, Homo sapiens
gcagctatgctgattaaaatgatacttaaaaaagataatgattcctacgtatcattctacaatgctctactacatgaaggatataaagatcttgctgcccttctccatgatggcattcctgttgtctcttcttccagtggtaaagattcagttagtggaataacttcgtatgtaaggacagtcctgtgtgaaggtggagtaccacagaggccagttgtttttgtcacaaggaagaagctggtgaatgcaattcagcagaagctctccaaattgaaaggtgaaccaggatgggtcaccatacatggaatggcaggctgtgggaagtctgtattagctgcagaagctgttagagatcattcccttttagaaggttgtttcccagggggagtgcattgggtttcagttgggaaacaagacaaatctgggcttctgatgaaactgcagaatctttgcacacggttggatcaggatgagagtttttcccagaggcttccacttaa

SEQ ID NO: 607 - DNA, 500 bp, Homo sapiens
agcagctgagtgcgcatcaaatctgaagaaaatctacacagtacagacagtacagatattttggagtgtatacaataatatccctcctgtgactagcctgcctttgagatgtagttatcatttaatgagaggagagaggcgaccactttgggaagaggagagtaatgcaaagggtggcgtatggaagatgaaagtccccaaggacagcacgtccacagtttggaaagagttgctgttagcaaccatcggggaacagttcacagactgtgccgcagcagatgatgaagtaataggagttagtgtcagtgttcgggaccgagaagacgtcgtccaagtctggaatgtaaatgcctctttagtgggtgaagcgactgttttagaaaagatctatgaacttctgccccacataacttttaaagcagtattttataaaccccatgaagagcatcatgcttttgaaggtggacgtggaaaacactaattgcactctgtaaagaatt

SEQ ID NO: 608 - DNA, 500 bp, Homo sapiens
aatcactccaagtgaaggttatagattgtatcctagatccccttctgctgtttccgcttcatatgaaacaaccttgtctcaagaaagagattctactatatttggtataaggggaaagaagttacatttttcatcttcttatgctcataaagcatcttccattgccaaatcctccagcttttgttctatggaaagagatgaggaagactctataatcgtctcagaaggaataattgaggaatacctagcattcgatcacatagatatagaagagggatttcatgggaagaaatcagaagcagctacagagaaacagaaattagggtatcctcccattgctccattttactgcatgaaagaagatgtccttgcttatgtgtttgacagtgtatggtgcaaggttgtgagctgtatggagcagttgacacgtagtcactgggaaggatttgcctctgatgatgagagtaatgttgcagttaccagacccgattcagaaagtt

SEQ ID NO: 609 - DNA, 25 bp, Homo sapiens
acagaacacccttctccgtcccctc

SEQ ID NO: 610 - DNA, 36 bp, Homo sapiens
tgcagcggagatgtacggctcctcttttgacttgga

SEQ ID NO: 611 - DNA, 461 bp, Homo sapiens
ctatgactttcaacgggactattatgataggatgtacagttacccagcacgtgtacctcctcctcctcctattgctcgggctgtagtgccctcgaaacgtcagcgtgtatcaggaaacacttcacgaaggggcaaaagtggcttcaattctaagagtggacagcggggatcttccaagtctggaaagttgaaaggagatgaccttcaggccattaagaaggagctgacccagataaaacaaaaagtggattctctcctggaaaacctggaaaaaatggaaaaggaacagagcaaacaagcagtagagatgaagaatgataagtcagaagaggagcagagcagcagctccgtgaagaaagatgagactaatgtgaagatggagtctgaggggggtgcagatgactctgctgaggagggggacctactggatgatgatgataatgaagatcggggggatgacc

SEQ ID NO: 612 - DNA, 216 bp, Homo sapiens
ctatgactttcaacgggactattatgataggatgtacagttacccagcacgtgtacctcctcctcctcctattgctcgggctgtagtgccctcgaaacgtcagcgtgtatcaggaaacacttcacgaaggggcaaaagtggcttcaattctaagagtggacagcggggatcttccaagtctggaaagttgaaaggagatgaccttcaggccattaa

SEQ ID NO: 613 - DNA, 277 bp, Homo sapiens
ctatgactttcaacgggactattatgataggatgtacagttacccagcacgtgtacctcctcctcctcctattgctcgggctgtagtgccctcgaaacgtcagcgtgtatcaggaaacacttcacgaaggggcaaaagtggcttcaattctaagagtggacagcggggatcttccaagtctggaaagttgaaaggagatgaccttcaggccattaagaaggagctgacccagataaaacaaaaagtggattctctcctggaaaacctggaaaaaatg

SEQ ID NO: 614 - DNA, 164 bp, Homo sapiens
cgatggccagcaacgttaccaacaagacagatcctcgctccatgaactcccgtgtattcattgggaatctcaacactcttgtggtcaagaaatctgatgtggaggcaatcttttcgaagtatggcaaaattgtgggctgctctgttcataagggctttgccttc

SEQ ID NO: 615 - DNA, 36 bp, Homo sapiens
accttcaggccattaagaaggagctgacccagataa

SEQ ID NO: 616 - DNA, 26 bp, Homo sapiens
taacctggctgcagagccaaaagtga

SEQ ID NO: 617 - DNA, 36 bp, Homo sapiens
agagccaaaagtgaaccgaggaaaagcaggtgtgaa

SEQ ID NO: 618 - DNA, 284 bp, Homo sapiens
ctatgactttcaacgggactattatgataggatgtacagttacccagcacgtgtacctcctcctcctcctattgctcgggctgtagtgccctcgaaacgtcagcgtgtatcaggaaacacttcacgaaggggcaaaagtggcttcaattctaagagtggacagcggggatcttccaagtctggaaagttgaaaggagatgaccttcaggccattaagaaggagctgacccagataaaacaaaaagtggattctctcctggaaaacctggaaaaaatggaaaagg

SEQ ID NO: 619 - DNA, 500 bp, Homo sapiens
ctcccgtgtattcattgggaatctcaacactcttgtggtcaagaaatctgatgtggaggcaatcttttcgaagtatggcaaaattgtgggctgctctgttcataagggctttgccttcgttcagtatgttaatgagagaaatgcccgggctgctgtagcaggagaggatggcagaatgattgctggccaggttttagatattaacctggctgcagagccaaaagtgaaccgaggaaaagcaggtgtgaaacgatctgcagcggagatgtacgggtcagtaacagaacacccttctccgtcccctctactcagctcctcttttgacttggactatgactttcaacgggactattatgataggatgtacagttacccagcacgtgtacctcctcctcctcctattgctcgggctgtagtgccctcgaaacgtcagcgtgtatcaggaaacacttcacgaaggggcaaaagtggcttcaattctaagagtggacagcggggat

SEQ ID NO: 620 - DNA, 91 bp, Homo sapiens
tcctgctcagccgatgaagtgatgcgcttcttctctgattgcaagatccaaaatggcacatcaggtattcgtttcatctacaccagagaag

SEQ ID NO: 621 - DNA, 418 bp, Homo sapiens
actcgcttacgtgagcagaagtagttctggtcgtcgtctaccgtctcgctatagccgtttgagggaagaaggaggaaaattacccggtatcgttagagctacaccaaaattgcattgagccaaacttgccaccaagagcccaacaatcaccatgatgctgagcacggaaggcagggaggggttcgtggtgaaggtcaggggcctaccctggtcctgctcagccgatgaagtgatgcgcttcttctctgattgcaagatccaaaatggcacatcaggtattcgtttcatctacaccagagaaggcagaccaagtggtgaagcatttgttgaacttgaatctgaagaggaagtgaaattggctttgaagaaggacagagaaaccatgggacacagatacgttgaagtattcaagtctaac

SEQ ID NO: 622 - DNA, 413 bp, Homo sapiens
cgcttcttctctgattgcaagatccaaaatggcacatcaggtattcgtttcatctacaccagagaaggcagaccaagtggtgaagcatttgttgaacttgaatctgaagaggaagtgaaattggctttgaagaaggacagagaaaccatgggacacagatacgttgaagtattcaagtctaacagtgttgaaatggattgggtgttgaagcatacaggtccgaatagccctgatactgccaacgatggcttcgtccggcttagaggactcccatttggctgtagcaaggaagagattgttcagttcttttcagggttggaaattgtgccaaatgggatgacactgccagtggactttcaggggcgaagcacaggggaagcctttgtgcagtttgcttcacaggagatagctga

SEQ ID NO: 623 - DNA, 206 bp, Homo sapiens
ttgttgaacttgaatctgaagaggaagtgaaattggctttgaagaaggacagagaaaccatgggacacagatacgttgaagtattcaagtctaacagtgttgaaatggattgggtgttgaagcatacaggtccgaatagccctgatactgccaacgatggcttcgtccggcttagaggactcccatttggctgtagcaaggaagag

SEQ ID NO: 624 - DNA, 500 bp, Homo sapiens
atggctgcagcttcatatgatcagttgttaaagcaagttgaggcactgaagatggagaactcaaatcttcgacaagagctagaagataattccaatcatcttacaaaactggaaactgaggcatctaatatgaaggaagtacttaaacaactacaaggaagtattgaagatgaagctatggcttcttctggacagattgatttattagagcgtcttaaagagcttaacttagatagcagtaatttccctggagtaaaactgcggtcaaaaatgtccctccgttcttatggaagccgggaaggatctgtatcaagccgttctggagagtgcagtcctgttcctatgggttcatttccaagaagagggtttgtaaatggaagcagagaaagtactggatatttagaagaacttgagaaagagaggtcattgcttcttgctgatcttgacaaagaagaaaaggaaaaagactggtattacgctcaacttcagaatctcactaa

SEQ ID NO: 625 - DNA, 275 bp, Homo sapiens
gtaatttccctggagtaaaactgcggtcaaaaatgtccctccgttcttatggaagccgggaaggatctgtatcaagccgttctggagagtgcagtcctgttcctatgggttcatttccaagaagagggtttgtaaatggaagcagagaaagtactggatatttagaagaacttgagaaagagaggtcattgcttcttgctgatcttgacaaagaagaaaaggaaaaagactggtattacgctcaacttcagaatctcactaaaagaatagatagt

SEQ ID NO: 626 - DNA, 164 bp, Homo sapiens
atatgaccagaaggcaattggaatatgaagcaaggcaaatcagagttgcgatggaagaacaactaggtacctgccaggatatggaaaaacgagcacagcgaagaatagccagaattcagcaaatcgaaaaggacatacttcgtatacgacagcttttacagtcc

SEQ ID NO: 627 - DNA, 500 bp, Homo sapiens
caaggaagtattgaagatgaagctatggcttcttctggacagattgatttattagagcgtcttaaagagcttaacttagatagcagtaatttccctggagtaaaactgcggtcaaaaatgtccctccgttcttatggaagccgggaaggatctgtatcaagccgttctggagagtgcagtcctgttcctatgggttcatttccaagaagagggtttgtaaatggaagcagagaaagtactggatatttagaagaacttgagaaagagaggtcattgcttcttgctgatcttgacaaagaagaaaaggaaaaagactggtattacgctcaacttcagaatctcactaaaagaatagatagtcttcctttaactgaaaatttttccttacaaacagatatgaccagaaggcaattggaatatgaagcaaggcaaatcagagttgcgatggaagaacaactaggtacctgccaggatatggaaaaacgagcacagcgaagaat

SEQ ID NO: 628 - DNA, 174 bp, Homo sapiens
tggagacagaatggaggtgctgccggactcggaaatggggtccaagggtagccaaggatggctgcagcttcatatgatcagttgttaaagcaagttgaggcactgaagatggagaactcaaatcttcgacaagagctagaagataattccaatcatcttacaaaactggaaact

SEQ ID NO: 629 - DNA, 500 bp, Homo sapiens
tcttgacaaagaagaaaaggaaaaagactggtattacgctcaacttcagaatctcactaaaagaatagatagtcttcctttaactgaaaatttttccttacaaacagatatgaccagaaggcaattggaatatgaagcaaggcaaatcagagttgcgatggaagaacaactaggtacctgccaggatatggaaaaacgagcacagcgaagaatagccagaattcagcaaatcgaaaaggacatacttcgtatacgacagcttttacagtcccaagcaacagaagcagagaggtcatctcagaacaagcatgaaaccggctcacatgatgctgagcggcagaatgaaggtcaaggagtgggagaaatcaacatggcaacttctggtaatggtcagggttcaactacacgaatggaccatgaaacagccagtgttttgagttctagtagcacacactctgcacctcgaaggctgacaagtcatctgggaaccaaggtggaaa

SEQ ID NO: 630 - DNA, 36 bp, Homo sapiens
accagatcattgggagaattgatgatatgagtagtc

SEQ ID NO: 631 - DNA, 303 bp, Homo sapiens
gagaagcagcggcccggggcgactgagcggacaaacggaagtgtaggttacggtctgagacatcaccgccaagctgggcatcggggagatggccgagactgaccccaagaccgtgcaggacctcacctcggtggtgcagacactcctgcagcagatgcaagataaatttcagaccatgtctgaccagatcattgggagaattgatgatatgagtagtcgcattgatgatctggaaaagaatatcgcggacctcatgacacaggctggggtggaagaactggaaagtgaaaacaagatacctgc

SEQ ID NO: 632 - DNA, 36 bp, Homo sapiens
caggatggattggaaaatgtaagtctctctcagttt

SEQ ID NO: 633 - DNA, 36 bp, Homo sapiens
gagaaaaaagttgaaaaggtggttgtgtcaaaccga

SEQ ID NO: 634 - DNA, 515 bp, Homo sapiens
gtccagtaattggaatgactccagataagagagctgaaaccccaggagctgaaaagattgcaggattaagccagatttacaaaatgggaagcttgcctgaagctgttgatgctgccaggccgaaggccactctagtggacagtgagtcagcagatgatgaactcacaaacttgaactggcttcatgaaagcactaatcttctaacaaacttcagcctcggaagtgagggtcttccaattgttagtccattgtatgacatagagggagatgatgtgccatcctttggaccagcttgctaccagaacccagaaaaaaaatcagcgacttcaaagcccccatactcctttagtcttctcatttatatggccattgagcactctccaaataaatgtttgcctgtcaaagaaatttatagctggattctggaccattttccatattttgctactgcaccaacaggctggaagaattctgttcgacataatctgtccctgaataaatgttttcagaaagtg

SEQ ID NO: 635 - DNA, 36 bp, Homo sapiens
atttaacccacgcagagtattctggcataagaatga

SEQ ID NO: 636 - DNA, 500 bp, Homo sapiens
acccgacaactctcagggagaaaactgtgttgttcttgtttataaccaagataaatgggcctggaatgatgttccttgtaactttgaagcaagtaggatttgtaaaatacctggaacaacattgaactagaaactcagaaagtggtccttgtgatggaaagagaaaagaaaaaccaattagaataaggcagaatgtacgtgcgtcattggaacacagaaaacatgctggttcatacagcgtttttagtcataatggtcttttttattttgtttgattcattcgagacaacatgtgtgtatgtgtgtgtgtgtgtgtgtagataatgtggtttttgtatggtgtttgatggaaggaataatctttctttgctttcttagtagtatttcaaggtgtttacttttcaattggtgtgcactgaatgcatgtatggaagaatagcgtgaataatgcaatctctttgtcatttttccccttctcagactcttagctcttaaaattc

SEQ ID NO: 637 - DNA, 346 bp, Homo sapiens
catatgtgatcacgttattggaggatggaaaagagccctggatgatggagaaaaaactgtcaaaaggtatgattccagattgggaatcaagatgggaaaacaaggaattatcaacaaagaaggataattatgatgaagattcaccccaaacagtaataatagaaaaagttgtaaaacaaagttatgaattttcaaattctaagaagaatttggaatatatagagaagttggaagggaagcatggaagtcaggtagaccatttcagaccagcaattctcacctctagagaaagccccactgcagacagtgtttacaaatacaatatatttagaagcacctttcattc

SEQ ID NO: 638 - DNA, 125 bp, Homo sapiens
ttcaagaccttttgccagagcaggatatgaaagatttatgccaaaaagtgacactgacaagacatagaagctggggccttgacaatttgcacttagtgaaagactggagaactgtgaatgaaggt

SEQ ID NO: 639 - DNA, 36 bp, Homo sapiens
ataaatctgtgcttgcagctcgatctccagttttta

SEQ ID NO: 640 - DNA, 500 bp, Homo sapiens
tttattcttcagctttaaattagactgattaattcacttcaaggccttaaattatcttcaatgacttctcttgttcatataatactttaattttttttattgtgccttgtcattttgaccaaggctatgcaggattgcactagctccataatgcagtaatattgataactgaagatactaagtttcaaaaggatcttccattattttgcaaaaagaaaaatgaattttatagggtttgtcctatgctatctcaaagtttaagttctctttaaaagcacttgtattggagattaccagtaatatctccaatctaagttctataaatatgggagaaccctcttaccttcaaggtaagttatggcaatacactgcttcaattctaatttatttttcatttcagggggcaaatatgcaatgagttggcctagatttttagtgacatttatgatgtttgtcttgtatgttaactgtccaacaaactgtgggtttattctaagttt

SEQ ID NO: 641 - DNA, 36 bp, Homo sapiens
gcacggtcttcagagaagccattatctgcaaaaata

SEQ ID NO: 642 - DNA, 500 bp, Homo sapiens
tgaagctcaaaagatctggtatgagcataggctcatcgacgacatggtggcccaagctatgaaatcagagggaggcttcatctgggcctgtaaaaactatgatggtgacgtgcagtcggactctgtggcccaagggtatggctctctcggcatgatgaccagcgtgctggtttgtccagatggcaagacagtagaagcagaggctgcccacgggactgtaacccgtcactaccgcatgtaccagaaaggacaggagacgtccaccaatcccattgcttccatttttgcctggaccagagggttagcccacagagcaaagcttgataacaataaagagcttgccttctttgcaaatgctttggaagaagtctctattgagacaattgaggctggcttcatgaccaaggacttggctgcttgcattaaaggtttacccaatgtgcaacgttctgactacttgaatacatttgagttcatggataaacttggagaaaacttga

SEQ ID NO: 643 - DNA, 36 bp, Homo sapiens
aaccaaacaaggaaaaagagctgaacgacaaaggaa

SEQ ID NO: 644 - DNA, 36 bp, Homo sapiens
gctgaaaaactggaaaaggttcaagctgaagaagaa

SEQ ID NO: 645 - DNA, 500 bp, Homo sapiens
gctcaacagcaggcagccagtgtcccaatcttagaagaacagattataaatttggaagcagaggtttcagctcaagataaagttttgagagaggcagaaaataagctggaacagagccagaaaatggtaattgaaaaggaacagagtttgcaggagtccaaagaggaatgtataaaattaaaggtggacttacttgaacaaaccaaacaaggaaaaagagctgaacgacaaaggaatgaagcactatataatgccgaagagctgagtaaagctttccaacaatataaaaaaaaagtggctgaaaaactggaaaaggttcaagctgaagaagaaatattagagagaaatctaactaactgtgaaaaagaaaataaaaggctacaagaaaggtgtggtctatataaaagtgaacttgaaattctgaaagagaaattaaggcagttaaaagaagaaaataacaacggaaaagaaaaattaaggatcatggcagtgaaaaattc

SEQ ID NO: 646 - DNA, 500 bp, Homo sapiens
actattcgtgagcacagaggagaaatggaacaaaaaataattaaattagaaggtactctggagaaatcagaattggaacttaaagaatgtaacaaacagatagaaagtctgaatgacaaattacaaaatgctaaagaacagcttcgagaaaaagagtttataatgctacaaaatgaacaggagataagtcaactgaaaaaagaaattgaaagaacacaacaaaggatgaaagaaatggagagtgttatgaaagagcaagaacagtacattgccactcagtacaaggaggccatagatttggggcaagaattgaggctgacccgggagcaggtgcagaactctcatacagaattggcagaggctcgtcatcagcaagtccaagcacagagagaaatagaaaggctctctagtgaactggaggatatgaagcaactctctaaagagaaagatgctcatggaaaccatttagctgaagaactgggggcttctaaagtacgtga

SEQ ID NO: 647 - DNA, 225 bp, Homo sapiens
ccgcaggcgctcggggttggagccagcgaccgtcggtagcagcatggctctcctctttctcctaccccttgtcatgcagggtgtgagcagggctgagatgggcaccgcggatctggggccgtcctcagtgcctacaccaactaatgttacaattgaatcctataacatgaaccctatcgtatattgggagtaccagatcatgccacaggtccctgtttttaccgt

SEQ ID NO: 648 - DNA, 36 bp, Homo sapiens
ctttgctgccccttgcaggtgatgctgtgattgttg

SEQ ID NO: 649 - DNA, 210 bp, Homo sapiens
atgctgtatgaatttattctggaaaggagaatgactttaactgatagcattgaacgctgcctgaaaaaaggtaagagtgatgagcaacgtgcagctgcagcgttagcatctgttctttgtattcagctgggccctggaattgaaagtgaagagattttgaaaactcttggaccaatcctaaagaaaatcatttgtgatgggtcagctagt

SEQ ID NO: 650 - DNA, 313 bp, Homo sapiens
gtgcagctgcagcgttagcatctgttctttgtattcagctgggccctggaattgaaagtgaagagattttgaaaactcttggaccaatcctaaagaaaatcatttgtgatgggtcagctagtatgcaggctaggcaaacttgtgcaacttgctttggtgtttgctgttttattgccacagatgacattactgaactatactcaactctggaatgtttggaaaatatcttcactaaatcctatctcaaagagaaagacactactgttatttgcagcactcctaatacagtgcttcatatcagctctcttcttgc

SEQ ID NO: 651 - DNA, 500 bp, Homo sapiens
aggaaggaactcaagaagacctagagtacaagttgaagggattaattgacctaaccctggataagagtgcgaagacaaggcaagcagctcttgaaggtattaaaaatgcactggcttcaaaaatgctgtatgaatttattctggaaaggagaatgactttaactgatagcattgaacgctgcctgaaaaaaggtaagagtgatgagcaacgtgcagctgcagcgttagcatctgttctttgtattcagctgggccctggaattgaaagtgaagagattttgaaaactcttggaccaatcctaaagaaaatcatttgtgatgggtcagctagtatgcaggctaggcaaacttgtgcaacttgctttggtgtttgctgttttattgccacagatgacattactgaactatactcaactctggaatgtttggaaaatatcttcactaaatcctatctcaaagagaaagacactactgttatttgcagcactcctaatacagtg

SEQ ID NO: 652 - DNA, 500 bp, Homo sapiens
gtgcagctgcagcgttagcatctgttctttgtattcagctgggccctggaattgaaagtgaagagattttgaaaactcttggaccaatcctaaagaaaatcatttgtgatgggtcagctagtatgcaggctaggcaaacttgtgcaacttgctttggtgtttgctgttttattgccacagatgacattactgaactatactcaactctggaatgtttggaaaatatcttcactaaatcctatctcaaagagaaagacactactgttatttgcagcactcctaatacagtgcttcatatcagctctcttcttgcatggacactactgctgaccatatgcccaatcaatgaagtgaagaaaaagcttgagatgcatttccataagcttccaagcctcctctcttgtgatgatgtaaacatgagaatagctgctggtgaatctttggcacttctctttgaattggccagaggaatagagagtgactttttttatgaagacatg

SEQ ID NO: 653 - DNA, 122 bp, Homo sapiens
gtgcagctgcagcgttagcatctgttctttgtattcagctgggccctggaattgaaagtgaagagattttgaaaactcttggaccaatcctaaagaaaatcatttgtgatgggtcagctagt

SEQ ID NO: 654 - DNA, 36 bp, Homo sapiens
tgctttttcctttttctgtgccagcgccacagccct

SEQ ID NO: 655 - DNA, 500 bp, Homo sapiens
agattatcgtccaaaagtgttaatgcccaagtgactgacatcaactccaagggattggaattgaggaagactgttactacagttgagactcagaacttggaaggcctgcatcatgatggccaattctgccataagccctgtcctccaggtgaaaggaaagctagggactgcacagtcaatggggatgaaccagactgcgtgccctgccaagaagggaaggagtacacagacaaagcccatttttcttccaaatgcagaagatgtagattgtgtgatgaaggacatggcttagaagtggaaataaactgcacccggacccagaataccaagtgcagatgtaaaccaaactttttttgtaactctactgtatgtgaacactgtgacccttgcaccaaatgtgaacatggaatcatcaaggaatgcacactcaccagcaacaccaagtgcaaagaggaaggatccagatctaacttggggtggctttgtcttcttcttttgcc

SEQ ID NO: 656 - DNA, 500 bp, Homo sapiens
tctcccgcgggttggtggacccgctcagtacggagttggggaagctctttcacttcggaggattgctcaacaaccatgctgggcatctggaccctcctacctctggttcttacgtctgttgctagattatcgtccaaaagtgttaatgcccaagtgactgacatcaactccaagggattggaattgaggaagactgttactacagttgagactcagaacttggaaggcctgcatcatgatggccaattctgccataagccctgtcctccaggtgaaaggaaagctagggactgcacagtcaatggggatgaaccagactgcgtgccctgccaagaagggaaggagtacacagacaaagcccatttttcttccaaatgcagaagatgtagattgtgtgatgaaggacatggcttagaagtggaaataaactgcacccggacccagaataccaagtgcagatgtaaaccaaactttttttgtaactctactgtatgtgaaca

SEQ ID NO: 657 - DNA, 500 bp, Homo sapiens
cagccttcctgatttctgcagctctgtgtgaaggtgcagttttgccaaggagtgctaaagaacttagatgtcagtgcataaagacatactccaaacctttccaccccaaatttatcaaagaactgagagtgattgagagtggaccacactgcgccaacacagaaattattgtaaagctttctgatggaagagagctctgtctggaccccaaggaaaactgggtgcagagggttgtggagaagtttttgaagagggctgagaattcataaaaaaattcattctctgtggtatccaagaatcagtgaagatgccagtgaaacttcaagcaaatctacttcaacacttcatgtattgtgtgggtctgttgtagggttgccagatgcaatacaagattcctggttaaatttgaatttcagtaaacaatgaatagtttttcattgtaccatgaaatatccagaacatacttatatgtaaagtattatttatttgaatctacaaaa

SEQ ID NO: 658 - DNA, 500 bp, Homo sapiens
agcagctgttaatatgtgccttgtggcaactggcggagcagatgcatattatgaaatgggaattcactgctgggatgttgcaggagctggcattattgttactgaagctggtggcgtgctaatggatgttacaggtggaccatttgatttgatgtcacgaagagtaattgctgcaaataatagaatattagcagaaaggatagctaaagaaattcaggttatacctttgcaacgagacgacgaagattaattaaggcagcctcatagtcaatcccagttgcttttccccagatttggtgactcatcaatggatatgtgttttggatgtatgatatgcttggtttaaattctctttgtccaggtcaaaaatttggaacttgtttcttattttactatgtctaggtttgcaagaattgacataatgtttgtttcactgatttaaaaaattttgcatgtaagaatgtactttaggaaacatacccaggaagtacagttgataa

SEQ ID NO: 659 - DNA, 36 bp, Homo sapiens
ctgagggaatgtgaatcagtgcttgtgaatgacttc

SEQ ID NO: 660 - DNA, 74 bp, Homo sapiens
agatggcggagtacgacttgactactcgcatcgcgcactttttggatcggcatctagtctttccgcttcttgaa

SEQ ID NO: 661 - DNA, 500 bp, Homo sapiens
gacccaattacagaatttgttgaatgtttatatgttaactttgactttgatggggctcagaaaaagctgagggaatgtgaatcagtgcttgtgaatgacttcttcttggtggcttgtcttgaggatttcattgaaaatgcccgtctcttcatatttgagactttctgtcgcatccaccagtgtatcagcattaacatgttggcagataaattgaacatgactccagaagaagctgaaaggtggattgtaaatttgattagaaatgcaagactggatgccaagattgattctaaattaggtcatgtggttatgggtaacaatgcagtctcaccctatcagcaagtgattgaaaagaccaaaagcctttcctttagaagccagatgttggccatgaatattgagaagaaacttaatcagaatagcaggtcagaggctcctaactgggcaactcaagattctggcttctactgaagaaccataaagaaaagatgaaaaaaaaa

SEQ ID NO: 662 - DNA, 25 bp, Homo sapiens
tatgccattggggtagttgtgtttc

SEQ ID NO: 663 - DNA, 36 bp, Homo sapiens
catccctgaaagtcccaagtgtcatgaaggaaatgg

SEQ ID NO: 664 - DNA, 36 bp, Homo sapiens
ttgacttttgctgtcgagcgagaaaatgtcattgaa

SEQ ID NO: 665 - DNA, 36 bp, Homo sapiens
gagtgtgctacagtgctggtaagctgcccattgaaa

SEQ ID NO: 666 - DNA, 36 bp, Homo sapiens
agtaaaagtccaccagcggaatttatgcgtatgatt

SEQ ID NO: 667 - DNA, 36 bp, Homo sapiens
ctgtcatggcccaatttcgatggattttgccattag

SEQ ID NO: 668 - DNA, 408 bp, Homo sapiens
gtgctgaagctcctcttcttgatgactttgtcatgtcttacctctttgctcagtggcggcatgattttgtgcacggatggataaaagtacctgtgactcatgaaacacaggaagaatgtcttgggatggcagtgttagatatgatgagaatagccaaagaaaacgatcaaaccccactggccatctataactctatcagctacaagacattcttaccaaaatgtattcgagcaaagatccaagactatcatattttgacaaggaagcgaataaggtacagatttcgcagatttattcagcaattcagccaatgcaaagccactgccagaaacttgaaacttaagtatcttataaatctggaaactctgcagtctgccttctacacagagaaatttgaagtaaaagaac

SEQ ID NO: 669 - DNA, 500 bp, Homo sapiens
aaaatgtattcgagcaaagatccaagactatcatattttgacaaggaagcgaataaggtacagatttcgcagatttattcagcaattcagccaatgcaaagccactgccagaaacttgaaacttaagtatcttataaatctggaaactctgcagtctgccttctacacagagaaatttgaagtaaaagaacctggaagtggtccttcaggtgaggagatttttgcaaccattataataactggaaacggtggaattcagtggtcaagagggaaacataaagaaagtgagacactgacagaacaggatttacagttatattgcgattttcctaatattattgatgtcagtattaagcaagcaaaccaagagggttcaaatgaaagccgagttgtaactatccataagcaagatggtaaaaatctggaaattgaacttagctcattaagggaagctttgtctttcgtgtcattaattgatggatattatagattaactgcag

SEQ ID NO: 670 - DNA, 500 bp, Homo sapiens
taattatggaatatttaccatatggaagtttacgagactatcttcaaaaacataaagaacggatagatcacataaaacttctgcagtacacatctcagatatgcaagggtatggagtatcttggtacaaaaaggtatatccacagggatctggcaacgagaaatatattggtggagaacgagaacagagttaaaattggagattttgggttaaccaaagtcttgccacaagacaaagaatactataaagtaaaagaacctggtgaaagtcccatattctggtatgctccagaatcactgacagagagcaagttttctgtggcctcagatgtttggagctttggagtggttctgtatgaacttttcacatacattgagaagagtaaaagtccaccagcggaatttatgcgtatgattggcaatgacaaacaaggacagatgatcgtgttccatttgatagaacttttgaagaataatggaagattaccaagaccagatgga

SEQ ID NO: 671 - DNA, 127 bp, Homo sapiens
tgtgaagatgtcttttctttgcaaggagacaaagttccccgtcttttgctttgtggccataccgtctgtcatgactgtctcactcgcctacctcttcatggaagagcaatccgttgcccatttgatc

SEQ ID NO: 672 - DNA, 35 bp, Homo sapiens
accacaccactgataatggtgtgggtcctgaggaa

SEQ ID NO: 673 - DNA, 36 bp, Homo sapiens
caccacctccaggaaaagtgtcttctcagaaacaac

SEQ ID NO: 674 - DNA, 36 bp, Homo sapiens
aaaccaccaggcttgaagtgtcttctcggaaaaaac

SEQ ID NO: 675 - DNA, 500 bp, Homo sapiens
ctttatccacgcttactctgaaagaggcagatcccagttcaaaagcagccatgagaaggaaggattcaccacctccaggaaaagtgtcttctcagaaacaaccagctgagaaggctacaagtgacgacaaagattctgtttcaaatatagccacagaaataaaggagggaccaatatctgggacagtgtcttctcagaaacaaccagctgagaaggctacaagtgacgagaaagattctgtttcaaacatagccacagaaataaagaagggacaacaatctgggacagtgtctcctcagaaacaatcggcccggaaggttatatttaaaaagaaagtttctcttttgaatattgccacaagaataatgggtggtgggaaatctggaacagtgtcttctcagaaacagccagcctcaaaggctacaagtgacaagacagattctgctttgaatatagctacagaaataaaggatggactacagtgtgggacagtgtcttct

SEQ ID NO: 676 - DNA, 500 bp, Homo sapiens
cacgatctataaaagatgtgcttcctcctattgaagaggctgttgacaggtgtctctacctactggaccgttttgcacagcctgtgacaaaggataagtttgctttggaatctgagaatatttcagaaccatactttacgaacagaaggactatttctcaacaatctgcagaaaatttagatgctgcatgtggcattgacaaaacagaaaatggaaacatgtttgaagaccaaaatgttgataaggaaggaaaagcactaccagcaactggacaaaaagcaaatgtgtctcctgagcaaccgcctttattcacgaatcttctgagcgacctcctttatccacgcttactctgaaagaggcagatcccagttcaaaagcagccatgagaaggaaggattcaccacctccaggaaaagtgtcttctcagaaacaaccagctgagaaggctacaagtgacgacaaagattctgtttcaaatatagccacagaaataaaggagg

SEQ ID NO: 677 - DNA, 36 bp, Homo sapiens
atctgcgatctgtttgtggtaccagcatcaagatga

SEQ ID NO: 678 - DNA, 55 bp, Homo sapiens
ggaaaattaagcagatgctccagtttgagaaacctggatctgcgatctgtttgtg

SEQ ID NO: 679 - DNA, 36 bp, Homo sapiens
cagcttcgtatctctcaacatgaagccaaaatcaag

SEQ ID NO: 680 - DNA, 500 bp, Homo sapiens
gatgctgagcttcagaaacttaaggaaatgaccaaccaccagaaaaaacgagcagctgagatgatggcatctttactaaaagaccttgcagaaataggaattgctgtgggaaataatgatgtaaagcagcctgagggaactggcatgatagatgaagagttcactgttgcaagactctacattagcaaaatgaagtcagaagtaaaaaccatggtgaaacgttgcaagcagttagaaagcacacaaactgagagcaacaaaaaaatggaagaaaatgaaaaggagttagcagcatgtcagcttcgtatctctcaacatgaagccaaaatcaagtcattgactgaataccttcaaaatgtggaacaaaagaaaagacagttggaggaatctgtcgatgccctcagtgaagaactagtccagcttcgagcacaagagaaagtccatgaaatggaaaaggagcacttaaataaggttcagactgcaaatgaagttaagcaagc

SEQ ID NO: 681 - DNA, 153 bp, Homo sapiens
atgatagatgaagagttcactgttgcaagactctacattagcaaaatgaagtcagaagtaaaaaccatggtgaaacgttgcaagcagttagaaagcacacaaactgagagcaacaaaaaaatggaagaaaatgaaaaggagttagcagcatgt

SEQ ID NO: 682 - DNA, 181 bp, Homo sapiens
gatctccgctgtgaacttcctaagttggaaaagcgacttcgagctacagctgagagagtgaaagctttggaatcagcactgaaagaagctaaagaaaatgcatctcgtgatcgcaaacgctatcagcaagaagtagatcgcataaaggaagcagtcaggtcaaagaatatggccagaagag

SEQ ID NO: 683 - DNA, 25 bp, Homo sapiens
caaggagcggaaagactagatgccg

SEQ ID NO: 684 - DNA, 241 bp, Homo sapiens
caaggaatcatcaaactcactcatttaatttgcctttgtcacaagaaggagaattctacgagtgtgaagatgaacgtatttacactctaaaggagattgttgaatggaagattcctaagaacagaacaagaactgtaaaccttacagatttttcaaataagtgggactcaacgaatccatttcctaaagacttttatggtaccctgattctcaagcctgtttatgaaattcaaggtgtgat

SEQ ID NO: 685 - DNA, 500 bp, Homo sapiens
tccatgctacctgcagaggggtccatacggcgttgttctggattcccgtcgtaacttaaagggaaactttcacaatgtccggagcccttgatgtcctgcaaatgaaggaggaggatgtccttaagttccttgcagcaggaacccacttaggtggcaccaatcttgacttccagatggaacagtacatctataaaaggaaaagtgatggcatctatatcataaatctcaagaggacctgggagaagcttctgctggcagctcgtgctattgttgccattgaaaaccctgctgatgtcagtgttatatcctccaggaatactggccagagggctgtgctgaagtttgctgctgccactggagccactccaattgctggccgcttcactcctggaaccttcactaaccagatccaggcagccttctgggagccacggcttcttgtggttactgaccccagggctgaccaccagcctctcacggaggcatcttatgttaaccta

SEQ ID NO: 686 - DNA, 36 bp, Homo sapiens
caattgctggccgcttcactcctggaaccttcacta

SEQ ID NO: 687 - DNA, 3681 bp, Homo sapiens
tgttgaaattcatcttgatctcctgagctcaagagatcctcctcagtctcccaagtagctgagattacagatatctcttccaaatgcacgatgaaggagttcttgtcaacagcgcaaggcaacagagaagtgttccatgcagggacattgcaaatacatgaaagtcatcacaatggagatttttgctaccaggatgttgataaagatattcatgactatgaatttcaatggcaagaagatgaaagaaatggccatgaagcacccatgacaaaaatcaaaaagttgacaggtagtacagaacgatatgatcaaagtcatgctagaaacaagcctattaaagatcagcttggatcaagctttcattcgcatctgcctgaaatgcacatatttcagaccgaagagaaaattgataatcaagttgtgaagtctatccacgatgcttccttggtttcaacagcccaaagaatttcttgtaggcccaaaacccatatatctaataaccatgggaataatttctggaattcttcattactcacacaaaaacaggaagtacacatgagagaaaaatctttccaatgtaatgagagtggcaaagcctttaattacagctcactcttaaggaaacatcagataatccatttagcagacaaatataaatgtgatgtatgtggcaagctctttaatcagaagcgaaacctagcatgccatcgtagatgtcacactggtgagaatccttacaagtgtaatgagtgtggcaagaccttcagtcagacgtcatcccttacatgccatcgtagacttcatactggagagaaaccttacaaatgtgaagaatgcgacaaagctttccatttcaaatcaatacttgaaagacatagtataattcatactgaagagaaaccatataagtgtaatgagtgtggcaagacctttaggcagaagtcaatccttacacgccatcatcgacttcatactggagagaaaccttacaagtgtaatgagtgtggcaagacctttagtcacaagtcatcccttacatgccatcatagacttcatactggagagaaaccctacaaatgtaatgagtgtggcaagacctttagtcacaagtcatcccttacatgccatcgtagacttcatactggagagaaaccttacaaatgtgaagaatgtgacaaagcttacagtttcagatcaaattttgaaatacatcggaaaattcatactgaagacaatgcttacaagtgtaatgagtgtggaaagacctttagccggacatcatcccttacatgccatcgtagacgtcatactggagagcaaccttacaaatgtgaagaatgtgacaaagctttccgtttcaaatcgaaccttgaaagacataggagaattcatactggagagaaaccatacaagtgtaatgagtgtggcaagacctttagtcggaagtcatacctcacatgccatcatagacttcatactggagagaaagcttacaagtgtaatgagtgcggcaagacctttagttggaagtcatcccttacctgccatcgtagacttcattctggagagaaaccttacaagtgtaaggagtgtggcaagaccttcaatcagcagttaacccttaaacgccatcgtagacttcatagtggagagaacccttacaaatgtgaagatagtgacaaagcttacagtttcaaatcaaaccttgaaatacatcagaaaattcatactgaagagaatccttacaagtgtaatgagtgtggcaagaccttcagtcggacgtcatcccttacatgccatcgtagacttcataccggagagaaaccttacaaatgtgaagaatgtgacaaagctttccgtgtgaaatcaaaccttgaaggacataggagaattcatactggagagaaaccttacaagtgtaatgagtgtggcaagacctttagtcggaagtcatattttatatgccatcacagacttcatactggagagaaaccttataagtgtaatgagtgtggcaagaactttagtcagaagtcatcccttatatgccaccatagacttcatactggagagaaaccttacaagtgtaatgagtgtggcaagacctttagtcagaagtcaaaccttacatgccatcgtagacttcatactggagaaaaacaagtgtaatgaatgtggtgaggtttttaatcaacaagcacaccttgcaggtcatcatagaattcatactggggagaaaccttagaaatgtgaagcatgtgataaagtttacagtggcaaatcaagcctcagaagacaggagaattcatactggagagaaagcttataaatgtgaagaatgtcacaaagtttacagtcgcacatcaaaccgtgaaagacaggagaattcatactggagagaaaccataaaaatgtaagagtttgtgacaaggcttttgggcatgattcgcacctggcacaacatgctagaattcacactggagagaaaccttaccagtgtaatgagtgtggcaaagcctttagtaggcagtcaacacttgtttaccgtcaggcaatccatggtgtagggaaactttactaaggtaatgattgtcacaaagtcttcagtaatgctacaaccattgtgaatcactggagaatccataaggaagagagatcatactagggtaataaatgtggcagatttttcagacattgttcataccttgcagttcatcggtgaactcaacgctggagagaaaccttacaaatgtcatgactgtggcaaggtcttcagtcaagcttcatcctatgcaaaacataggagaattcatacaggagagaaacctcacatgtgtgatgatagtggcaaagccttcacttcacacctcatgagacatcagagaatgcatactggacagaaatcttacaaatgtcatcaatgtgccaaggtcttcagtctgagttcactccttgcagaatatgagaaaattcattttggaggtagttggtccatatgcaatgagtagagcaaaccatcaagcattaattgacattagggtcaattcagcattgacttgagtttgtattgacttaacattgagttcaagcattaattgacattagtgtttatgttaagaggattgggccaggcacatcagcttacacctgtaatctgagcgctttgggaggccaaggtgggtagatcacttgaggtcaggagtttgagatcagcctggccaacagacgtgagccattttcccagcctgttttttgtttctttaaaaaaactgatagggatttttatggatatcatgttgaatctaaatcacattgggttattatataatcatttcacaatattaatttttccaagctatcaatatgggttgtagctcaatgtttttaatcattttgatcaatgtttgtagatttcaaggtacaaacttctgacctttgtacgtttatttctaagtatttctttaagttctccagcaaatggaagtgttttaaaattttcttttaaaattgtttattgttaaagtatggaaattcaactaatttttggtgctgatactgtattgtgcaaatccactgactatgttacttagttccagtagtattttggttggctctttgtgattttctacacagaagattatgtcatctacaaacaaatataattttacttcttactttctg

SEQ ID NO: 688 - DNA, 36 bp, Homo sapiens
cgcttcactcctggaaccttcactaaccggatccag

SEQ ID NO: 689 - DNA, 36 bp, Homo sapiens
gagaaaaatctgggacagtgtctcctcagaaacaat

SEQ ID NO: 690 - DNA, 36 bp, Homo sapiens
caaccaccaggcttgaaggctacaagagacgagaaa

SEQ ID NO: 691 - DNA, 36 bp, Homo sapiens
gtacctttttgtctgcaggtcattattgctgtggtt

SEQ ID NO: 692 - DNA, 500 bp, Homo sapiens
tagaagtaatgcaaggatcagaacaacagtggattgagtttggtggtaatgcagttaaggagggtgacgttcttaggagatttgaagaacattctccaccaagaggaattaatgatagacattttcgaaaacggtctcattcaaaatctcccagaagaacacgttctcgttcccctcttggattttatgttcacttaaaaaatctgtccctcagtattgacgaaagagatttaagaaatttctttagaggtactgatctgactgatgaacagattaggtttttatataaagatgaaaatagaacaagatatgcctttgtgatgttcaagactctgaaagactataataccgctctgagtttacataagactgttttacaatatcgtccagttcatattgatccaatttctagaaaacaaatgctgaagttcattgcacgttatgaaaagaagagatcagggtcactagagagagataggcccggacatgtttcacaaaaa

SEQ ID NO: 693 - DNA, 28 bp, Homo sapiens
aaatgcattacggaggaaagaacgagaa

SEQ ID NO: 694 - DNA, 500 bp, Homo sapiens
taaaaatgaaaaaatgcttcggtcgcccatctcacccctctctgatgcatctaaacacaaatacaccagcgaggacttaacttcttccagccgacctaatggcaacagtttgtttacttcagcctcttccagcaaaaagcctaaggccgacagccagctgcagcctcacggcggagacctcacgaaagcagctcacaacaattctgaaaacattcccctccacaagtcacggccgcagacgaagccgtggtctccaggctccaacggccacagggactgcaagaggcagaaacttgtcttcgatgatatgcctcgcagtgccgattattttatgcaagaagctaaacgaatgaagcataaagcagatgcaatggtggaaaagtttggaaaggctttgaactatgctgaagcagcattgtcgtttatcgagtgtggaaatgcaatggaacaaggccccatggaatccaaatctccttatacgatgtattcagaaacagtag

SEQ ID NO: 695 - DNA, 166 bp, Homo sapiens
taaaaatgaaaaaatgcttcggtcgcccatctcacccctctctgatgcatctaaacacaaatacaccagcgaggacttaacttcttccagccgacctaatggcaacagtttgtttacttcagcctcttccagcaaaaagcctaaggccgacagccagctgcagcct

SEQ ID NO: 696 - DNA, 244 bp, Homo sapiens
caccgctttgatggctgcctcacaaacttcacaaactgttgcatctcacgttccttttgcagatttgtgttcaactttagaacgaatacagaaaagtaaaggacgtgcagaaaaaatcagacacttcagggaatttttagattcttggagaaaatttcatgatgctcttcataagaaccacaaagatgtcacagactctttttatccagcaatgagactaattcttcctcagctagaaagagag

SEQ ID NO: 697 - DNA, 26 bp, Homo sapiens
gaggactttgtctcctactccatcag

SEQ ID NO: 698 - DNA, 25 bp, Homo sapiens
cccgactgtaagcaatctacgaaga

SEQ ID NO: 699 - DNA, 94 bp, Homo sapiens
gatcggatgatccatcggtccacgagccagggctccatcaactcccctgtgtacagccgccacagctacactccaaccacgtcccgctctcccc

SEQ ID NO: 700 - DNA, 500 bp, Homo sapiens
tccgtctctgcagcctaccaggacatcctcggaaagtatttattctaggccaggctccagtattcctggctcaccaggtcatactatctatgcaaaagtagacaatgagatcctggattacaaggatttagcagccattccgaaggtcaaggcaatttatgacattgaacgtccagatcttattacctatgagcctttctacacttcgggctatgatgacaaacaggagagacagagccttggagagtctccgaggactttgtctcctactccatcagcagaagggtaccaggatgttcgggatcggatgatccatcggtccacgagccagggctccatcaactcccctgtgtacagccgccacagctacactccaaccacgtcccgctctccccagcatttccacagacctggcaatgagccgtccagcggccggaactcccctctcccttaccggccagacagccgccctctaactccaacttacgctcaggccccta

SEQ ID NO: 701 - DNA, 484 bp, Homo sapiens
gtggcaaatcttttagccaatcctcaacccttactacacataagataattcatactggagagaaaccctacaaatgtgaagaatgtggcaaagcctttaactggtcctcaactcttactaaacataacataattcatactgaagagaaaccctacaaatgtgaaaaatgtggcaaagcctttaagcagtcttcaatccttactaaccataagagaattcatactggagagaaaccctataaatgtgaagaatgtggcaaatcttttaaccggtcttcaacttttactaaacataaggtaattcatactggagtaaaaccctacaaatgtgaagaatgtggcaaagcatttttctggtcctcaaccctaactaaacataagagaattcatactggagagcaaccctacaaatgggaaaaatttggcaaagcctttaatcggtcctcgcacctcaccacagataagataactcattggagagaaat

SEQ ID NO: 702 - DNA, 486 bp, Homo sapiens
gggaaaaatttggcaaagcctttaatcggtcctcgcacctcaccacagataagataactcattggagagaaatcttacaagtatgaataatgtgccaaagcctaagaaaaccctcaattcttaatagatataagattattcctactggagagaaactacaaacctgagagaggcgctaatgcttttgacagtacctaaaactttaaagaaaatcattctgctgaaaaatcctagaaatgtgaagaatgtgaaaaagcctttaaatgattgtcacacttgattgtaggtaagataattcatactggagaaaactaccagtgtgaacaacgtggccaagcttcgacaatgctcacaccctattgcacaggaaagcatttatacttgagaagaaatgtacaaatattggcaaagtaaaaaatccattaacacctgctcacatcttactcaaaattgtagagttcatagtaaataaaagcattaaaattc

SEQ ID NO: 703 - DNA, 260 bp, Homo sapiens
acataagaggatgcacactggagagaaaccctacaaatgtgaagaatgtggcaaagcttttagccagtcctcaacccttactacacataagataattcatactggagagaaacgctacaaatgcttagaatgtggcaaagcttttaagcaactctcaactcttactacacataaaataattcatgttggagagaaactctacaaatgtgaagaatgcggcaaaggttttaatcgatcttcaaatcttactacacataaga

SEQ ID NO: 704 - DNA, 500 bp, Homo sapiens
gtatatgaataactgaaacagaagtttcacaaaattatgattatgtttgccacaaatggtgtgctctaatattttccttctgtttcatcagaagaaaaatactggttactatccagctaagctgattttgtgacccattaatgagtttcagttctcactttgaaaacactgttctagaattacagaaaggtctagggatgagaactaacaccactgtgcatcacagtgtgtcagtctgtgccaggcagcttataaatattttttgcctctaatttttatacatttatgaggtaagtatcattttctaggtaaggatgctaatctgtctccaagccaaataacacacagtaaatcatggcaccaggatttgaatctgggtctttatacatcatagcccatgctgttctcactgtattttgctttttccaagtataaccccgttttcacacgaatggccccttcacatatttgaagactaccgtcgtgtccgtgctgaccct

SEQ ID NO: 705 - DNA, 165 bp, Homo sapiens
tctctgcgcatcctgtgacaagcggattcgtgcctatgagatgacaatgcgggtgaaagacaaagtgtatcacctggaatgtttcaagtgcgccgcctgtcagaagcatttctgtgtaggtgacagatacctcctcatcaactctgacatagtgtgcgaacagga

SEQ ID NO: 706 - DNA, 45 bp, Homo sapiens
atggcaaatagaaatgaaacatttggaagtgagcaggaaaacgct

SEQ ID NO: 707 - DNA, 346 bp, Homo sapiens
caggcttgaagtgtcttctcggaaaaaagcagccttgaaggctacaagtgatgagaaagattctttttcaaatataaccagagaaagaaaggatggagaaacatctaggacagtgtcttctcagaaaccaccagccttgaaggctacaagtgacgaggaagattctgttttgaatatagccagagaaaaaaaggatggagaaaaatctagaacagtgtcttctgagcaaccaccaggcttgaaggctacaagagatgagaaagattctcttttgaatatagccagaggaaaaaagcatggagaaaaaactaggagagtgtcttctcggaaaaaagcagccttgaag

SEQ ID NO: 708 - DNA, 500 bp, Homo sapiens
cagctgagaaggctacaagtgacgacaaagattctgtttcaaatatagccacagaaataaaggagggaccaatatctgggacagtgtcttctcagaaacaaccagctgagaaggctacaagtgatgagaaagattctgtttcaaatatagccacagaaataaaggagggacaacaatctgggacagtgtctcctcagaaacaatcagcctggaaggttatatttaaaaagaaagtttctcttttgaatattgccacaagaataacgggcggtgggaaatctggaacagtgtcttctcagaaacaaccaccctcaaaggctacaagtgacaagacagattctgctttgaatatagctacagaaataaaggatggactacaatgtgggacagtgtcttctcagaaacaaccagccttgaaggctacaactgacgaggaagattctgtttcgaatatagccacagaaataaaggatggagaaaaatctgggacagtgtcttct

SEQ ID NO: 709 - DNA, 36 bp, Homo sapiens
aaaccagcaggcttgaagtgtcttctcggaaaaaac

SEQ ID NO: 710 - DNA, 36 bp, Homo sapiens
ctcccaaggtttttgcagctcacagaaagaataatc

SEQ ID NO: 711 - DNA, 355 bp, Homo sapiens
gaagatgacaaccaggcacaggaaatcattaagaagctggagaagagtataaagtttcttagccagtgtgcagcacgagtggccagtagggctgagatgttgggagccatcaatcaggaaagccgggttagtaaagcagttgaagtgatgattcagcacgtagaaaacttgaagaggatgtatgccaaagagcacgctgaattagaagaactgaaacaggttcttctgcagaatgaaaggtctttcaatcctcttgaagatgatgatgactgccaaattaaaaaacgttcagcttctctaaactccaagccatcttctctacgaagagtgactattgcctctttacccagaaata

SEQ ID NO: 712 - DNA, 500 bp, Homo sapiens
gaagatgacaaccaggcacaggaaatcattaagaagctggagaagagtataaagtttcttagccagtgtgcagcacgagtggccagtagggctgagatgttgggagccatcaatcaggaaagccgggttagtaaagcagttgaagtgatgattcagcacgtagaaaacttgaagaggatgtatgccaaagagcacgctgaattagaagaactgaaacaggttcttctgcagaatgaaaggtctttcaatcctcttgaagatgatgatgactgccaaattaaaaaacgttcagcttctctaaactccaagccatcttctctacgaagagtgactattgcctctttacccagaaatattggaaatgcaggaatggtggctgggatggaaaataatgatcgattcagtagaaggtcaagcagttggcgtattttggggtcaaagcagagtgaacaccgtccctcattacctcgatttattagcacctattcctgggcagatgc

SEQ ID NO: 713 - DNA, 498 bp, Homo sapiens
actctgtggtttcccctcttcctgtaaccactgtgaaatcggttaaccttagacaaagtgagaacacttctgctaatgagaaggaggtggaggcagaatttctcagattatctttgggatttaagtgtgactggtttaccttggagaagagagtgaagcttgaagagaggtcccgtgacttggcagaagaaaatttgaagaaagaaatcactaactgtttaaaactattagagtctttaacacctctgtgtgaagatgacaaccaggcacaggaaatcattaagaagctggagaagagtataaagtttcttagccagtgtgcagcacgagtggccagtagggctgagatgttgggagccatcaatcaggaaagccgggttagtaaagcagttgaagtgatgattcagcacgtagaaaacttgaagaggatgtatgccaaagagcacgctgaattagaagaactgaaacaggttcttctgcagaatgaaaggtctttca

SEQ ID NO: 714 - DNA, 500 bp, Homo sapiens
gattatctttgggatttaagtgtgactggtttaccttggagaagagagtgaagcttgaagagaggtcccgtgacttggcagaagaaaatttgaagaaagaaatcactaactgtttaaaactattagagtctttaacacctctgtgtgaagatgacaaccaggcacaggaaatcattaagaagctggagaagagtataaagtttcttagccagtgtgcagcacgagtggccagtagggctgagatgttgggagccatcaatcaggaaagccgggttagtaaagcagttgaagtgatgattcagcacgtagaaaacttgaagaggatgtatgccaaagagcacgctgaattagaagaactgaaacaggttcttctgcagaatgaaaggtctttcaatcctcttgaagatgatgatgactgccaaattaaaaaacgttcagcttctctaaactccaagccatcttctctacgaagagtgactattgcctctttacccagaaat

SEQ ID NO: 715 - DNA, 151 bp, Homo sapiens
gggtaaaattgaactgtgtgccaggtttcacactgatggggaattttttactgcagagttaaactcctgactatagacttttatgatggaaacacgtggcacccatcttccacgtctgaaggcataactagtgattcattcaacccctgtt

SEQ ID NO: 716 - DNA, 36 bp, Homo sapiens
aataagtgtttttcacaggctatcgagactcatttg

SEQ ID NO: 717 - DNA, 500 bp, Homo sapiens
ataccgccattgggactgaaagtgtataagattttggaatcagcaagttcaaattcacatttagctgattatgtcttgtataagaataaagtagaagatagcggaattttcaccataaagaatatgataaatactgaagaaggtataacactagagaactcctttgttttacttcggtttgatcaaactggacttatgaagcaaatgatgactaaagaagatggtaaacaccatgaagtaaatgtgcaattttcatggtatggaaccacaattaaaagagacaaaagtggtgcctacctcttcttacctgatggtaatgccaagccttatgtttacacaacaccgccctttgtcagagtgacacatggaaggatttattcggaagtgacttgcttttttgaccatgttactcatagagtccgactataccacatacagggaatagaaggacagtctgtggaagtttccaatattgtggacatccgaaaagtatataaccg

SEQ ID NO: 718 - DNA, 138 bp, Homo sapiens
atgtgcaataccaacatgtctgtacctactgatggtgctgtaaccacctcacagattccagcttcggaacaagagaccctggttagaccaaagccattgcttttgaagttattaaagtctgttggtgcacaaaaagac

SEQ ID NO: 719 - DNA, 36 bp, Homo sapiens
ttcctagaagctgcaaaggtaaatgttttaaatgtt

SEQ ID NO: 720 - DNA, 36 bp, Homo sapiens
gattcgctatgtttgcaggtgatggcttggacaaca

SEQ ID NO: 721 - DNA, 500 bp, Homo sapiens
ctgataacttcctaaacatcaccaatgtagcttttgatgaccgtgggctctatacctgtttcgtcacctctccaattcgtgcctcctactctgtcaccctacgtgttatcttcacctcgggagacatgagtgtctattacatgattgtttgcctgattgcctttacaatcacactcatcttgaatgtcacacggctgtgcatgatgagcagccatcttcgcaagactgagaaggccatcaatgagttctttagaactgaaggggctgagaaacttcagaaggcctttgagattgcaaaacgtatccccatcattacctcagccaaaactctggagctcgccaaagtcacacaatttaagaccatggagtttgctcgttatattgaagaactggcaagaagtgtccctcttccacctcttattctaaactgtcgagcctttgttgaggagatgtttgaggctgtgcgagtggatgaccctgatgacctgggtgaaagaatt

SEQ ID NO: 722 - DNA, 36 bp, Homo sapiens
aaatcacaagtagctgaagccaaaatgaccttcaag

SEQ ID NO: 723 - DNA, 36 bp, Homo sapiens
caggaaagccagaaacagcttttgcaagaagctgaa

SEQ ID NO: 724 - DNA, 42 bp, Homo sapiens
gagtcatctttaaaggatgccagctttgagaaggaggcaaca

SEQ ID NO: 725 - DNA, 500 bp, Homo sapiens
ttaaagatgaaagattgggctgctatgcttggagaagacataacggatgatgataacttggaattagaaatgaacagtgaatcggaaaatggtgcttacttagataatcctccaaaaggagctttgaagaaactgattcatgctgctaagttaaatgcttctttaaaaaccttagaaggagaaagaaaccaaatttatattcagttgtctgaagttgataaaacaaaggaagagcttacagagcatattaaaaatcttcagactgaacaagcatctttgcagtcagaaaacacacattttgaaaatgagaatcagaagcttcaacagaaacttaaagtaatgactgaattatatcaagaaaatgaaatgaaactccacaggaaattaacagtagaggaaaattatcggttagagaaagaagagaaactttctaaagtagatgaaaagatcagccatgccactgaagagctggagacctatagaaagcgagccaaagatct

SEQ ID NO: 726 - DNA, 500 bp, Homo sapiens
aaaaagagttaaaagaagagaaatccaaacattctgaacaagatgaattgatggcggatatttcaaaaaggatacagtctctagaagatgagtcaaaatccctcaaatcacaagtagctgaagccaaaatgaccttcaagatatttcaaatgaatgaagaacgactgaagatagcaataaaagatgctttgaatgaaaattctcaacttcaggaaagccagaaacagcttttgcaagaagctgaagtatggaaagaacaagtgagtgaacttaataaacagaaagtaacatttgaagactccaaagtacatgcagaacaagttctaaatgataaagaaagtcacatcaagactctgactgaacgcttgttaaagatgaaagattgggctgctatgcttggagaagacataacggatgatgataacttggaattagaaatgaacagtgaatcggaaaatggtgcttacttagataatcctccaaaaggagctttgaagaaa

SEQ ID NO: 727 - DNA, 500 bp, Homo sapiens
gtcaaaatccctcaaatcacaagtagctgaagccaaaatgaccttcaagatatttcaaatgaatgaagaacgactgaagatagcaataaaagatgctttgaatgaaaattctcaacttcaggaaagccagaaacagcttttgcaagaagctgaagtatggaaagaacaagtgagtgaacttaataaacagaaagtaacatttgaagactccaaagtacatgcagaacaagttctaaatgataaagaaagtcacatcaagactctgactgaacgcttgttaaagatgaaagattgggctgctatgcttggagaagacataacggatgatgataacttggaattagaaatgaacagtgaatcggaaaatggtgcttacttagataatcctccaaaaggagctttgaagaaactgattcatgctgctaagttaaatgcttctttaaaaaccttagaaggagaaagaaaccaaatttatattcagttgtctgaagttgataaaa

SEQ ID NO: 728 - DNA, 36 bp, Homo sapiens
aaccgcaccagccaagagaatatctcatttgaaacc

SEQ ID NO: 729 - DNA, 36 bp, Homo sapiens
tcctccttcaggaccaacgtacagaggtgcagttcc

SEQ ID NO: 730 - DNA, 36 bp, Homo sapiens
aatatatttgttttccagcctggcctacttggcaac

SEQ ID NO: 731 - DNA, 130 bp, Homo sapiens
ggttggtgagcacacgtctggcctacagaatgcggcctctgagacatgaagacaccatctccatgtgaccgaacactgcagctgtctgaccttccaaagactaagactcgcggcaggttctctttgagtc

SEQ ID NO: 732 - DNA, 500 bp, Homo sapiens
aaatcaacctatcctccttcaggaccaacgtacagaggtgcagttccatggtacaccataaatcttgacttaccaccctacaaaagatggcatgaattgatgcttgacaaggcaccaatgctaaaggttatagtgaattctctgaagaatatgataaatacattcgtgccaagtggaaaagttatgcaggtggtggatgaaaaattgcctggcctacttggcaactttcctggcccttttgaagaggaaatgaagggtattgccgctgttactgatatacctttaggagagattatttcattcaatattttttatgaattatttaccatttgtacttcaatagtagcagaagacaaaaaaggtcatctaatacatgggagaaacatggattttggagtatttcttgggtggaacataaataatgatacctgggtcataactgagcaactaaaacctttaacagtgaatttggatttccaaagaaacaacaaaactgtctt

SEQ ID NO: 733 - DNA, 382 bp, Homo sapiens
gaccgttggaaacatcccttcttccttgatgatcgcagaacgcctgcaaagatgtgtctgaaccgcaccagccaagagaatatctcatttgaaaccatgtatgatgtcctgtcaacaaaacctgtcctcaacaagctgaccgtatacacaaccttgatagatgttaccaaaggtcaattcgaaacttacctgcgggactgccctgacccttgtataggttggtgagcacacgtctggcctacagaatgcggcctctgagacatgaagacaccatctccatgtgaccgaacactgcagctgtctgaccttccaaagactaagactcgcggcaggttctctttgagtcaaaagcttgtcttcgtccatctgttgacaaatgaca

SEQ ID NO: 734 - DNA, 286 bp, Homo sapiens
tggacagaggactgcagaaaatcaacctatcctccttcaggaccaacgtacagaggtgcagttccatggtacaccataaatcttgacttaccaccctacaaaagatggcatgaattgatgcttgacaaggcaccaatgctaaaggttatagtgaattctctgaagaatatgataaatacattcgtgccaagtggaaaagttatgcaggtggtggatgaaaaattgcctggcctacttggcaactttcctggcccttttgaagaggaaatgaagggtattgccgctg

SEQ ID NO: 735 - DNA, 66 bp, Homo sapiens
ttgatagatgttaccaaaggtcaattcgaaacttacctgcgggactgccctgacccttgtataggt

SEQ ID NO: 736 - DNA, 68 bp, Homo sapiens
atggtacaccataaatcttgacttaccaccctacaaaagatggcatgaattgatgcttgacaaggcac

SEQ ID NO: 737 - DNA, 51 bp, Homo sapiens
tctctgaagaatatgataaatacattcgtgccaagtggaaaagttatgcag

SEQ ID NO: 738 - DNA, 36 bp, Homo sapiens
cttggcaactttcctggcccttttgaagaggaaatg

SEQ ID NO: 739 - DNA, 142 bp, Homo sapiens
atggtacaccataaatcttgacttaccaccctacaaaagatggcatgaattgatgcttgacaaggcaccaatgctaaaggttatagtgaattctctgaagaatatgataaatacattcgtgccaagtggaaaagttatgcag

SEQ ID NO: 740 - DNA, 115 bp, Homo sapiens
aaatcaacctatcctccttcaggaccaacgtacagaggtgcagttccatggtacaccataaatcttgacttaccaccctacaaaagatggcatgaattgatgcttgacaaggcac

SEQ ID NO: 741 - DNA, 305 bp, Homo sapiens
acctttggagaaaagggacgtacagaaggagctctcagccctgaagaagctcacacagacatcaggggaaaccacacacacagataaagtaccaggaggtgaggataaaagcatcaacgcgtttagggaaactgcaaaacagaaactggacccagcagcaagtgtaactggtagcaagaggcacccaaaaactaaggaaaaggcccaacccctagaagacctggctggctggaaagagctcttccagacaccagtatgcactgacaagcccacgactcacgagaaaactaccaaaatagcctgca

SEQ ID NO: 742 - DNA, 36 bp, Homo sapiens
ctaccaaaatagcctgcagatcacaaccagacccag

SEQ ID NO: 743 - DNA, 36 bp, Homo sapiens
attccacttcctccataggctccatgttggctcagg

SEQ ID NO: 744 - DNA, 36 bp, Homo sapiens
ctgagcaggatcgtgcaggtgattgctggtgccact

SEQ ID NO: 745 - DNA, 36 bp, Homo sapiens
aagagagctgaagaaaaggtaaagagcagacagcta

SEQ ID NO: 746 - DNA, 36 bp, Homo sapiens
actcttttgatggcccaggacacagtttggctcatg

SEQ ID NO: 747 - DNA, 26 bp, Homo sapiens
agtggaaagcggaatgacggacaaga

SEQ ID NO: 748 - DNA, 1275 bp, Homo sapiens
ctacaaccagatctgaattcttgttggcagccattttgtgaagagacgaagactgagctgttttggctgcatttctggcctcgagccgcagtcagcttctccccgtagaacccggcagtaggagacttagaatcgaatctcttctccctcccgcctcctgtttttggctttttgagaaaccttatcatccaacacaatggccagcaacgttaccaacaagatggatcctcactccgtgaactcccgtgtgttcattgggaatctcaacactcttgttgtcaagaaatctgatgtggaggcgatcttttccaagtatggcaaaattgcgggctgctctgttcataagggctttgccttcgttcaatatgataaggagaaaaatgcccgggctgctgtagcaggagaggatggcagaatgattgctagccaggttgcagttattaacctggctgcagagccaaaagtgaaccgaggaaacgcaggtgtgaaacgatccgcagcggagatgtacggctcctcttttgacttggactatggctttcaacgggattattatgatgggatgtacagtttcccagcacgtgtacctcctcctcctcccattgctctggctgtagtgccctcgaaacaccagcgcatatcaggaaacacctcacgaaggggcaaaagtggcttcaattctaagagtggaaagcggggatcttccaagtctggaaagctgaaaggagatgaccttcaggccattaagcaggagttgacccagataaaacagaaagtggattctctcctggaaaacctggaaaaaattgaaaaggaacagagcaaacaagaggtagaggtgaaaaatgctaagtcagaagaggagcagagcagtagctccatgaagaaagatgagactcatgtaaagatggagtctgaggggggtgcagaagactctgctgaggagggggacccactggatgatgatgataatgaagatcagggggacaaccagcttcatttgatcaagaataatgaaaaagatgctgaggaaggagaggataacagagacagcaccaatggccaggatgactcttaagcacatagtggggttgagaaatcttatcccattgtttctttacctaggagcttgtctaacaacaaatttttcaccagatcctctcccttagtatcttcagcacatgcttactgttctccccatccttgtccttcccacattcattaattcatattgccctgtgcctagtcccattttcacttcccatgacaccccta

SEQ ID NO: 749 - DNA, 216 bp, Homo sapiens
tttcacaacgggtttgctgccagaacacaggtgtcgtgaaaactacccctaaaagccaaaatgggaaaagaaaagactcatatcaacattgtcgtcattggacacgtagattcgggcaagtccaccacttctggccatctgatctacaaatgcggtggcatcgacaaaagaacaattgaaaaattgcagaaagaggctgctgagatgggaaagggc

SEQ ID NO: 750 - DNA, 206 bp, Homo sapiens
tttcacaacgggtttgctgccagaacacaggtgtcgtgaaaactacccctaaaagccaaaatgggaaaagaaaagactcatatcaacattgtcgtcattggacacgtagattcgggcaagtccaccacttctggccatctgatctacaaatgcggtggcatcgacaaaagaacaattgaaaaattgcagaaagaggctgctgagat

SEQ ID NO: 751 - DNA, 45 bp, Homo sapiens
cagtggacattcagcatttgagcccctggtggccagtggagtccc

SEQ ID NO: 752 - DNA, 38 bp, Homo sapiens
ggtcactgcccaagccgtccctcagtgcctggcccagc

SEQ ID NO: 753 - DNA, 36 bp, Homo sapiens
ccttcgatctcctgacgaaaactggcgatggaatat

SEQ ID NO: 754 - DNA, 500 bp, Homo sapiens
ccaagagaaaaactaaggctaaagttaaagaactcactaaagaagagctcaagaaggagaaagagaaacctgagtcaaggaaggaaagtaagaatgaagagagaaaaaaggggaagaaagaggatgtccgaaaggataagaaaattgctgatgcagacctatccaggaaggagtctcctaagggtaaaaaggacagagaaaaagagaaagtggacctagaaaaaagtgctaaaaccaaggaaaataggaaaaaatcaacaaatatgaaggatgtttctagtaaaatggcatcccgagacaaagatgacagaaaggaaagtagaagttctaccagatatgcacacttaacaaagggaaatacccagaaaagaaacggctaaagctctggcatcatcatcccagaacatggtcatgttccagattgcagtttgttacaaaaaagcatggaaaatgtaatattgctctgattggtgagggtgtgtaaattagccattgaatgt

SEQ ID NO: 755 - DNA, 36 bp, Homo sapiens
ccgaagaccagaccgcagagttcaaggaggccttcc

SEQ ID NO: 756 - DNA, 36 bp, Homo sapiens
gttgtatcaactatgaagcgtttgtgaggcatatcc

SEQ ID NO: 757 - DNA, 26 bp, Homo sapiens
gtgacttcaccgaagaccagaccgca

SEQ ID NO: 758 - DNA, 58 bp, Homo sapiens
tggactttgagcactttctgcccatgctgcagacagtggccaagaacaaggaccaggg

SEQ ID NO: 759 - DNA, 25 bp, Homo sapiens
attactgcaggaaaaggtcccggag

SEQ ID NO: 760 - DNA, 25 bp, Homo sapiens
cccggagagctgagcagtcaagatg

SEQ ID NO: 761 - DNA, 371 bp, Homo sapiens
attactgcaggaaaaggtcccggagagctgagcagtcaagatgtgtgacttcaccgaagaccagaccgcagagttcaaggaggccttccagctgtttgaccgaacaggtgatggcaagatcctgtacagccagtgtggggatgtgatgagggccctgggccagaaccctaccaacgccgaggtgctcaaggtcctggggaaccccaagagtgatgagatgaatgtgaaggtgctggactttgagcactttctgcccatgctgcagacagtggccaagaacaaggaccagggcacctatgaggattatgtcgaaggacttcgggtgtttgacaaggaaggaaatggcaccgtcatgggtgctgaaatccggc

SEQ ID NO: 762 - DNA, 25 bp, Homo sapiens
tgtgacttcaccgaagaccagaccg

SEQ ID NO: 763 - DNA, 500 bp, Homo sapiens
gatagatcactgttggaaatggaaaaaagggaacgaagagctctagaaagaagaatatctgaaatggaagaagagctcaaaatgttaccagacctaaaagcagacaaccagaggctaaaggatgaaaatggggccttgatcagagttataagcaaactttccaaataaaaaaaaaaaagcagcaagtaatggaattgcacatattagtaacccagtggaccataattggcagtcactggaagtctgggaagaatccttggagactgtcattttcggatatcctgccaaatgccctcttatctagaatttttgtttcattttgtttaattttctggggtgtttttgttgttgttggtttgttttttgtttttttttttaatcaagaccattgtttcatgttaatgcagctgctgagaagatttttttttaatgactgagaaaacttgtttacagctccagcatataaggaaagtgttcaaggccagatatgcctcagatat

SEQ ID NO: 764 - DNA, 267 bp, Homo sapiens
gctgaaaatgaaaagctgaaggcacagctacatgatacaaatatggaactaacagatcttaaattacagttggaaaaggccacccagagacaagaaagatttgctgatagatcactgttggaaatggaaaaaagggaacgaagagctctagaaagaagaatatctgaaatggaagaagagctcaaaatgttaccagacctaaaagcagacaaccagaggctaaaggatgaaaatggggccttgatcagagttataagcaaactttcc

SEQ ID NO: 765 - DNA, 500 bp, Homo sapiens
tcaagtcaactaaacaggccaaatagtcttgtaggcataacttctgcttactccagaggaataacaaaagaaaatgaaagagagggagaaaaaagagaagaggagaaagaaggagaagataaatcacaacctaaatcaatcagagaacgacgacgaccaagagagaaaagaagatctacaggagtttcattttggacacaagatagtgatgaaaatgaacaagaacaacaatcagacacagaagagggatccaataagaaagaaactcagacggattccatttctagatatgaaaccagttctacatcagctggtgatcgatatgattccttgctgggtcgctctggatcatacagttacttagaagaaagaaaaccttacagcagcaggctagaaaaggatgactcaactgactttaaaaagctttatgaacaaattctagctgaaaatgaaaagctgaaggcacagctacatgatacaaatatggaactaacagatct

SEQ ID NO: 766 - DNA, 500 bp, Homo sapiens
gaacaacaatcagacacagaagagggatccaataagaaagaaactcagacggattccatttctagatatgaaaccagttctacatcagctggtgatcgatatgattccttgctgggtcgctctggatcatacagttacttagaagaaagaaaaccttacagcagcaggctagaaaaggatgactcaactgactttaaaaagctttatgaacaaattctagctgaaaatgaaaagctgaaggcacagctacatgatacaaatatggaactaacagatcttaaattacagttggaaaaggccacccagagacaagaaagatttgctgatagatcactgttggaaatggaaaaaagggaacgaagagctctagaaagaagaatatctgaaatggaagaagagctcaaaatgttaccagacctaaaagcagacaaccagaggctaaaggatgaaaatggggccttgatcagagttataagcaaactttccaaataaaaaaaaaa

SEQ ID NO: 767 - DNA, 500 bp, Homo sapiens
taaacaggccaaatagtcttgtaggcataacttctgcttactccagaggaataacaaaagaaaatgaaagagagggagaaaaaagagaagaggagaaagaaggagaagataaatcacaacctaaatcaatcagagaacgacgacgaccaagagagaaaagaagatctacaggagtttcattttggacacaagatagtgatgaaaatgaacaagaacaacaatcagacacagaagagggatccaataagaaagaaactcagacggattccatttctagatatgaaaccagttctacatcagctggtgatcgatatgattccttgctgggtcgctctggatcatacagttacttagaagaaagaaaaccttacagcagcaggctagaaaaggatgactcaactgactttaaaaagctttatgaacaaattctagctgaaaatgaaaagctgaaggcacagctacatgatacaaatatggaactaacagatcttaaattacag

SEQ ID NO: 768 - DNA, 36 bp, Homo sapiens
acggcgcccatcttacagaaaaattttgaaagactt

SEQ ID NO: 769 - DNA, 147 bp, Homo sapiens
gagccttacagttggcaagtccaggcacagatggagtacagggacttcagacattaaccatgacaaattcaggcagtactcagcaaggtacaactattcttcagtatgcacagacctctgatggacagcagatacttgtgcccagca

SEQ ID NO: 770 - DNA, 500 bp, Homo sapiens
gccaccatgccactgagagcgagcacagcctctccccagcagacctgggctcccccgcgtccccaaaggagagcagtgaggcgctggatgctgctgctgcgctctctgtggctgagtgtgtggagcggatggcccccacactgccaaaaagtgacttgaatgaagtgaaagagctgctaaaaaccaacaagaagttggccaaaatgattggtcacatctttgagatgaacgatgatgatccacacaaagaggaggaaattcggaaatacagtgcaatatatggcagatttgactcaaagaggaaggatgggaaacatctcacacttcatgagctcactgttaatgaagcggctgctcaactctgtgtgaaggataatgccctgctgacaagaagagatgagctttttgccttggctcgacagatttctcgagaagtcacctataaatatacttacagaaccaccaagtcaaaatgtggagaaagagatgaattatcccca

SEQ ID NO: 771 - DNA, 98 bp, Homo sapiens
gctgctcaactctgtgtgaaggataatgccctgctgacaagaagagatgagctttttgccttggctcgacagatttctcgagaagtcacctataaata

SEQ ID NO: 772 - DNA, 500 bp, Homo sapiens
ctgctgctgcgctctctgtggctgagtgtgtggagcggatggcccccacactgccaaaaagtgacttgaatgaagtgaaagagctgctaaaaaccaacaagaagttggccaaaatgattggtcacatctttgagatgaacgatgatgatccacacaaagaggaggaaattcggaaatacagtgcaatatatggcagatttgactcaaagaggaaggatgggaaacatctcacacttcatgagctcactgttaatgaagcggctgctcaactctgtgtgaaggataatgccctgctgacaagaagagatgagctttttgccttggctcgacagatttctcgagaagtcacctataaatatacttacagaaccaccaagtcaaaatgtggagaaagagatgaattatccccaaagagaattaaagtggaggatgggtttccagatttccaggattctgtgcaaacactcttccagcaggctagagctaagagtgaagaactt

SEQ ID NO: 773 - DNA, 36 bp, Homo sapiens
tatttgctaacttttcagagtcaaacagatgaaatc

SEQ ID NO: 774 - DNA, 36 bp, Homo sapiens
aatggatatgctccaaaggcaaggtcttagacctat

SEQ ID NO: 775 - DNA, 500 bp, Homo sapiens
cctgtattgacattaaaagataattctaagtatggtacctttgttaatgaggaaaaaatgcagaatggcttttcccgaactttgaagtcgggggatggtattacttttggagtgtttggaagtaaattcagaatagagtatgagcctttggttgcatgctcttcttgtttagatgtctctgggaaaactgctttaaatcaagctatattgcaacttggaggatttactgtaaacaattggacagaagaatgcactcaccttgtcatggtatcagtgaaagttaccattaaaacaatatgtgcactcatttgtggacgtccaattgtaaagccagaatattttactgaattcctgaaagcagttgagtccaagaagcagcctccacaaattgaaagtttttacccacctcttgatgaaccatctattggaagtaaaaatgttgatctgtcaggacggcaggaaagaaaacaaatcttcaaagggaaaacatttatattttt

SEQ ID NO: 776 - DNA, 500 bp, Homo sapiens
ctgcccgccgcgggcccggcaggaggagaaccatacagacttttgactggcgttgagtacgttgttggaaggaaaaactgtgccattctgattgaaaatgatcagtcgatcagccgaaatcatgctgtgttaactgctaacttttctgtaaccaacctggtatagaaaaacattttggaaatttctacagaaaaagtaaaattgttactagtcaaacagatgaaatccctgtattgacattaaaagataattctaagtatggtacctttgttaatgaggaaaaaatgcagaatggcttttcccgaactttgaagtcgggggatggtattacttttggagtgtttggaagtaaattcagaatagagtatgagcctttggttgcatgctcttcttgtttagatgtctctgggaaaactgctttaaatcaagctatattgcaacttggaggatttactgtaaacaattggacagaagaatgcactcaccttgtcatggtatca

SEQ ID NO: 777 - DNA, 158 bp, Homo sapiens
gcagttgtctttggaggtggggaagctaggttgataacagaagagaatgaagaagaacataatttctttttggctccgggaacgtgtgttgttgatacaggaataacaaactcacagaccttaattcctgactgtcagaagaaatggattcagtcaat

SEQ ID NO: 778 - DNA, 500 bp, Homo sapiens
caggaccaagcctttcacaaggcgtgtcagttgatgaaaaactaatgccaagcgccccagtgaacactacaacatacgtagctgacacagaatcagagcaagcagatacatgggatttgagtgaaaggccaaaagaaatcaaagtctccaaaatggaacaaaaattcagaatgctttcacaagatgcacccactgtaaaggagtcctgcaaaacaagctctaataataatagtatggtatcaaatactttggctaagatgagaatcccaaactatcagctttcaccaactaaattgccaagtataaataaaagtaaagatagggcttctcagcagcagcagaccaactccatcagaaactactttcagccgtctaccaaaaaaagggaaagggatgaagaaaatcaagaaatgtcttcatgcaaatcagcaagaatagaaacgtcttgttctcttttagaacaaacacaacctgctacaccctcattgtggaaaaataag

SEQ ID NO: 779 - DNA, 500 bp, Homo sapiens
ccatctattggaagtaaaaatgttgatctgtcaggacggcaggaaagaaaacaaatcttcaaagggaaaacatttatatttttgaatgccaaacagcataagaaattgagttccgcagttgtctttggaggtggggaagctaggttgataacagaagagaatgaagaagaacataatttctttttggctccgggaacgtgtgttgttgatacaggaataacaaactcacagaccttaattcctgactgtcagaagaaatggattcagtcaataatggatatgctccaaaggcaaggtcttagacctattcctgaagcagaaattggattggcggtgattttcatgactacaaagaattactgtgatcctcagggccatcccagtacaggattaaagacaacaactccaggaccaagcctttcacaaggcgtgtcagttgatgaaaaactaatgccaagcgccccagtgaacactacaacatacgtagctgacacagaatc

SEQ ID NO: 780 - DNA, 340 bp, Homo sapiens
tgcagtgatgggtggtggcgtggtagctacaatggacaagttggatggttcccttcaaactatgtaactgaagaaggtgacagtcctttgggtgaccatgtgggttctctgtcagagaaattagcagcagtcgtcaataacctaaatactgggcaagtgttgcatgtggtacaggctctttacccattcagctcatctaatgatgaagaacttaatttcgagaaaggagatgtaatggatgttattgaaaaacctgaaaatgacccagagtggtggaaatgcaggaagatcaatggtatggttggtctagtaccaaaaaactatgttaccgttatgcaga

SEQ ID NO: 781 - DNA, 447 bp, Homo sapiens
gaaaacctagtgtgccagattctgcatctcctgctgatgatagttttgttgacccaggggaacgtctctatgacctcaacatgcccgcttatgtgaaatttaactacatggctgagagagaggatgaattatcattgataaaggggacaaaggtgatcgtcatggagaaatgcagtgatgggtggtggcgtggtagctacaatggacaagttggatggttcccttcaaactatgtaactgaagaaggtgacagtcctttgggtgaccatgtgggttctctgtcagagaaattagcagcagtcgtcaataacctaaatactgggcaagtgttgcatgtggtacaggctctttacccattcagctcatctaatgatgaagaacttaatttcgagaaaggagatgtaatggatgttattgaaaaacctgaaaatgacccagagtggtgga

SEQ ID NO: 782 - DNA, 38 bp, Homo sapiens
gggacagaaataacccagagccctggaacaaactgggt

SEQ ID NO: 783 - DNA, 36 bp, Homo sapiens
agatggtggagtccgtcatgccggtggtggtgtgca

SEQ ID NO: 784 - DNA, 36 bp, Homo sapiens
aggtcagattgctgtcagacatggcccatgaacatg

SEQ ID NO: 785 - DNA, 25 bp, Homo sapiens
tggcatagttgaaaagaagtccaga

SEQ ID NO: 786 - DNA, 374 bp, Homo sapiens
atcgcccgcctcattgagttctataagcacgagagctgtggccagtgtaccccatgccgtgagggtgtggactggatgaacaaggtgatggcacgtttcgtgaggggggatgcccggccggccgagatcgactccctgtgggagatcagcaagcagatagaaggccatacgatttgtgctctgggtgacggggccgcctggcctgtgcagggtctgatccgccactttcggccggagctcgaggagcggatgcagcggtttgcccagcagcatcaggcccggcaggctgcctcttagcccaccaccctggcctgctgtcctgcgtctatccatgtggaatgctggacaataaagcgagtgctgcccaccctcca

SEQ ID NO: 787 - DNA, 36 bp, Homo sapiens
ttactgagaagaccacagatggacagcaaatttggg

SEQ ID NO: 788 - DNA, 36 bp, Homo sapiens
tcttctgtgctgtcaagggacatggatttgattgac

SEQ ID NO: 789 - DNA, 36 bp, Homo sapiens
ttacagaggaggcatttactaaccagttaccagctg

SEQ ID NO: 790 - DNA, 58 bp, Homo sapiens
tgaaaggagaaaagggaattggtggagcagtcacagctacagatggactaagtgaaga

SEQ ID NO: 791 - DNA, 46 bp, Homo sapiens
ggaattggtggagcagtcacagctacagatggactaagtgaagagc

SEQ ID NO: 792 - DNA, 36 bp, Homo sapiens
tctgctgggtggatgcaggtgatggaaagctggaca

SEQ ID NO: 793 - DNA, 36 bp, Homo sapiens
tttcttttctctccttaggtattccagcgtcttcag

SEQ ID NO: 794 - DNA, 36 bp, Homo sapiens
tagaccacgattccgcaggtatggtccacgtaaaca

SEQ ID NO: 795 - DNA, 36 bp, Homo sapiens
cttatagcttcagctcaacctccatcaagggagacc

SEQ ID NO: 796 - DNA, 26 bp, Homo sapiens
tctgatgatgattcaagtatggaaga

SEQ ID NO: 797 - DNA, 500 bp, Homo sapiens
aaaataacatcgtctacgactggagataaacactttgataaaagtcccactaaaacaaggcaccctcggaaaattgatctaagagctcgatactgggcatttctttttgataatcttcgccgagcagtagatgaaatctatgtaacttgcgaatcagatcagagtgtggtcgaatgtaaggaggtgctaatgatgctggataactatgtaagagatttcaaagcattgattgactggattcagcttcaggaaaagctagagaagacagatgctcaaagcagaccaacatcattggcatgggaagtaaagaagatgtctccgggacgccatgtgattccaagtccatcaacagatagaataaatgtaacatcaaatgctcgacgaagcttaaattttggaggttcaactggcacagtgccagctcctcgtctggctcccacaggtgtcagttgggctgacaaggtaaaggctcatcatacaggctctactgcttcttcaga

SEQ ID NO: 798 - DNA, 500 bp, Homo sapiens
aagtcccactaaaacaaggcaccctcggaaaattgatctaagagctcgatactgggcatttctttttgataatcttcgccgagcagtagatgaaatctatgtaacttgcgaatcagatcagagtgtggtcgaatgtaaggaggtgctaatgatgctggataactatgtaagagatttcaaagcattgattgactggattcagcttcaggaaaagctagagaagacagatgctcaaagcagaccaacatcattggcatgggaagtaaagaagatgtctccgggacgccatgtgattccaagtccatcaacagatagaataaatgtaacatcaaatgctcgacgaagcttaaattttggaggttcaactggcacagtgccagctcctcgtctggctcccacaggtgtcagttgggctgacaaggtaaaggctcatcatacaggctctactgcttcttcagaaataacacccgcccagtcttgcccaccaatgacagtgcaga

SEQ ID NO: 799 - DNA, 162 bp, Homo sapiens
aaaataacatcgtctacgactggagataaacactttgataaaagtcccactaaaacaaggcaccctcggaaaattgatctaagagctcgatactgggcatttctttttgataatcttcgccgagcagtagatgaaatctatgtaacttgcgaatcagatcag

SEQ ID NO: 800 - DNA, 500 bp, Homo sapiens
agtgttccactagaaagcaaagatgatgatggaaaacctaaatgtcaaactggtggaaaatctaagaggaccattcaaggcactcataaaactactaaacagagtactgcagtggactgtaaaataacatcgtctacgactggagataaacactttgataaaagtcccactaaaacaaggcaccctcggaaaattgatctaagagctcgatactgggcatttctttttgataatcttcgccgagcagtagatgaaatctatgtaacttgcgaatcagatcagagtgtggtcgaatgtaaggaggtgctaatgatgctggataactatgtaagagatttcaaagcattgattgactggattcagcttcaggaaaagctagagaagacagatgctcaaagcagaccaacatcattggcatgggaagtaaagaagatgtctccgggacgccatgtgattccaagtccatcaacagatagaataaatgtaacatcaaatgctcg

SEQ ID NO: 801 - DNA, 253 bp, Homo sapiens
gtggctgctcctgggtgtagtgagatgtctccagccagggccaagcagcagcagtagcagcagcagcagtagcagcagcagcagcaacagcagcagcagcagcaacagcagcagcaaagggatttgaatttgttgaaatgagcagtcgtaaatcaaagagtaacagcttaattcacacagagtgcctttcacaggtacaaagaattttacgtgaaagattttgtcgtcagagtccacatagtaacctatttgg

SEQ ID NO: 802 - DNA, 500 bp, Homo sapiens
gagaaacccaatcctttgaggcaaaagaacgccaaggtgaaccaactcctcaaggtttcgctgccgaagcttgccaacgtgcagctcctggataccgacgggggttttgtgcactcggacggtgccatctcctgccacgacatgtttgattttctgcatctgacaggagggggctatgcaaagatctgcaaacccctgcatgaactgatcatgcagttgttggaggaaacacctgaggagaaacaaaccaccattgcctgactggctcttatcagtgttaatagcatctcagcttcctcagatcagttctatcactggcactacagaatccttctctttcttaaggcactttgcattgtagaatgttcctggatgttcatatctagtgtttgaaggggaggagggatttaaactggtcctgtacatagaaggtttgtttgacagaggagaaaaattagccaaggaagattgttgtttaaattcatttgaaaccagaaggg

SEQ ID NO: 803 - DNA, 27 bp, Homo sapiens
caaggagaagaagacttgatagaagac

SEQ ID NO: 804 - DNA, 500 bp, Homo sapiens
tgaacagtgtgactggaggaatggggatgggactggaccggatgagttccagctttgatagaatgggaccaggtataggagctatactggaaaggagcatcgatatggatcgaggatttttatcgggtccaatgggaagcggaatgagagagagaataggctccaaaggcaaccagatatttgtcagaaatctaccttttgacttgacttggcagaaactaaaagagaaattcagtcagtgtggtcatgtaatgtttgcagaaataaaaatggagaatggaaagtcaaaaggctgtggaacagtcagatttgactccccagaatcagctgaaaaagcctgcagaataatgaatggcataaaaatcagtggcagagaaattgatgttcgcttggatcgtaatgcataatttcaagccatggttggaacattcctacatctgttttgctgaatctcctagtaaaagtcatttttttaaagtaatattgtatgcttacaaaag

SEQ ID NO: 805 - DNA, 173 bp, Homo sapiens
tgaacagtgtgactggaggaatggggatgggactggaccggatgagttccagctttgatagaatgggaccaggtataggagctatactggaaaggagcatcgatatggatcgaggatttttatcgggtccaatgggaagcggaatgagagagagaataggctccaaaggcaac

SEQ ID NO: 806 - DNA, 36 bp, Homo sapiens
acacagcctcttctgcagcttccaaggagaggactg

SEQ ID NO: 807 - DNA, 131 bp, Homo sapiens
ggcaactttgaaagatatcaccaggagactaaagtccatcaaaaacatccagaaaattaccaagtctatgaaaatggtagcggcagcaaaatatgcccgagctgagagagagctgaaaccagctcgaatat

SEQ ID NO: 808 - DNA, 500 bp, Homo sapiens
acaaggatcctgcatatctcaaggaccctaaagtttgtaacatcagatatcgggaataaattctatcacgttaccactaataaacttattttacagtaagtggttgtatgatgccaatactgactcaaaccaacctttggatagaaaagtgtttgaggagtgaggtaaagaatgacacttccccttcataccaatgtccattaagcagattgcttatttaaaatgttaacactcatcacattttatctatgttgaataaaagtggttctgtgtgattgtcatttatatctgatccccaaatagctcatacaataatccattcaatagaatggaattaaaactgttcagaatgattttccaactagcaaatataagtatgcctggttaagatatcttccctttgtagaaatgttacattgggatggatagtggtgctgtcacagaaggacaaaatattcctagacgagtctatcctcaaaccagtagtgtcttttacatga

SEQ ID NO: 809 - DNA, 93 bp, Homo sapiens
gtggtgctacaaggtgccaacctgtatggttacatcaggtgtaaggtgcgcagcagaaagcatttaaccagcatggctacttcatattttgga

SEQ ID NO: 810 - DNA, 500 bp, Homo sapiens
aaagtgacaccgatgatgaaggagcacctcgaattagtctggctgagatgcttgaagaccttcatatttcccaagatgccactggtgaagaaggtgcatcaatgctgacataatgagatgttgtagactgtttccatacatgggcttaagaagttggacagagttaccttaagtgtctctactatctttgcctccagatttcaagaggagaaatttagttttaaacctgaataaacatgtttgttttcagtgctcactcaaaccactaaaacagatggatagctttgaggttttagataaggaaagattatggagaatgtagttgttattgatttttggcaattttacatttggaattttatcactgtgcttttttatatgaggcactgtagtattttcacatagtatagtactctggatgtaaaagctcaaaaattgtgattccttgaacgttcactaaatcttcaagcaaaaacacatttttacattatttttacgtt

SEQ ID NO: 811 - DNA, 363 bp, Homo sapiens
tgcgtgctgtgcggcgcggtctcagggaaggtggggctatggcagctgctagggaccctccggaagtatcgctgcgagaagccacccagcgaaaattgcggaggttttccgagctaagaggcaaacttgtagcacgtggagaattctgggacatagttgcaataacagcggctgatgaaaaacaggaacttgcttacaaccaacagctgtcagaaaagctgaaaagaaaggagttaccccttggagttcaatatcacgtttttgtggatcctgctggagccaaaattggaaatggaggatcaacactttgtgcccttcaatgtttggaaaagctatatggagataaatggaattcttttacca

SEQ ID NO: 812 - DNA, 494 bp, Homo sapiens
gaggacatgatggctggagctatctgaacacagtggaaagatgggaccctcaggctcgccagtggaattttgttgccactatgtctacccctaggagtacagtaggtgtggcagtactaagtggaaaactttatgcagttggtggtcgtgatggaagttcttgtctcaaatcagtagaatgttttgatcctcatactaataagtggacactgtgtgcacagatgtcaaaaaggagaggtggcgtaggagtgacgacctggaatggactgctgtatgctataggggggcacgatgctcccgcatccaacttgacttccagactctcagactgtgtggaaagatatgatcccaaaacagacatgtggactgcagtagcatccatgagcatcagcagagatgcagtgggggtctgtttacttggtgataagttatatgctgttggggggtatgatggacaggcataccttaatactgtggaggcttatgatccccag

SEQ ID NO: 813 - DNA, 500 bp, Homo sapiens
ctcattatggaagcaatgaagtaccatttattaccagagagacgacccatgttacaaagtcctcggacaaaacctaggaagtcaactgttggtacattatttgcagttgggggaatggattcaacaaaaggagcaacaagcattgaaaagtatgatctccgtacaaatatgtggactccagtagcaaatatgaatgggaggaggctacagttcggtgttgcagtgctagatgacaaactgtatgtggttggaggaagagatggactgaagactttgaatactgtagagtgctacaaccccaaaacaaaaacttggagtgtgatgccacctatgtccacacatagacatggccttggtgtggctgtactggaaggtcccatgtatgccgtaggaggacatgatggctggagctatctgaacacagtggaaagatgggaccctcaggctcgccagtggaattttgttgccactatgtctacccctaggagtacagtaggtgt

SEQ ID NO: 814 - DNA, 247 bp, Homo sapiens
actcttgggaaaactgctgggcaccgtcgtcgcgctgaaggtggttctgtacctgctccgagtgtgcttagcgatggcctggaaatccggcggcgccagccactcggagctaatccacaatctccgcaaaaatggaatcatcaagacagataaagtatttgaagtgatgctggctacagaccgctcccactatgcaaaatgtaacccatacatggattctccacaatcaataggtttccaagcaaca

SEQ ID NO: 815 - DNA, 36 bp, Homo sapiens
agaaaagcagtggtccagggatgaattgtaaaagca

SEQ ID NO: 816 - DNA, 36 bp, Homo sapiens
cagtctatgggaagtgaggattggatagctttagtc

SEQ ID NO: 817 - DNA, 143 bp, Homo sapiens
aaagcagctgctgcagctgcagccaagaacaaaacagggagtaaacctcgaaccagcgctaacagcaataaagataaggataaagatgagagaaagtggtttaaagtaccttcaaagaaggaggaaacttcaacttgtatagc

SEQ ID NO: 818 - DNA, 500 bp, Homo sapiens
tgagagaccagcactaagaaaagaagggctaaaagatgaggaagatttctttgattttaaagctggagaagaagttctggctcgttggacagactgtcgctattaccctgccaagattgaagcaattaacaaagaaggaacatttacagttcagttttatgatggagtaattcgttgtttaaaaagaatgcacattaaagccatgcccgaggatgctaaggggcaggtgaaatcccagcatccactaagctggtgttgtcctatcgacccagctggatcgtgtaaccagtctatgggaagtgaggattggatagctttagtcaaagcagctgctgcagctgcagccaagaacaaaacagggagtaaacctcgaaccagcgctaacagcaataaagataaggataaagatgagagaaagtggtttaaagtaccttcaaagaaggaggaaacttcaacttgtatagccacaccagacgtagagaagaaggaagatctgccta

SEQ ID NO: 819 - DNA, 471 bp, Homo sapiens
tttatgatggagtaattcgttgtttaaaaagaatgcacattaaagccatgcccgaggatgctaaggggcaggtgaaatcccagcatccactaagctggtgttgtcctatcgacccagctggatcgtgtaaccagtctatgggaagtgaggattggatagctttagtcaaagcagctgctgcagctgcagccaagaacaaaacagggagtaaacctcgaaccagcgctaacagcaataaagataaggataaagatgagagaaagtggtttaaagtaccttcaaagaaggaggaaacttcaacttgtatagccacaccagacgtagagaagaaggaagatctgcctacatctagtgaaacatttggacttcatgtagagaacgttccaaagatggtctttccacagccagagagcacattatcaaacaagaggaaaaataatcaaggcaactcgtttcaggcaaagagagctc

SEQ ID NO: 820 - DNA, 65 bp, Homo sapiens
ttttaaagctggagaagaagttctggctcgttggacagactgtcgctattaccctgccaagattg

SEQ ID NO: 821 - DNA, 500 bp, Homo sapiens
aaaaattgactatgaggagggcaagatgttggtccattttgagcgctggagtcatcgttatgatgagtggatttactgggatagcaatagattgcgaccccttgagagaccagcactaagaaaagaagggctaaaagatgaggaagatttctttgattttaaagctggagaagaagttctggctcgttggacagactgtcgctattaccctgccaagattgaagcaattaacaaagaaggaacatttacagttcagttttatgatggagtaattcgttgtttaaaaagaatgcacattaaagccatgcccgaggatgctaaggggcaggtgaaatcccagcatccactaagctggtgttgtcctatcgacccagctggatcgtgtaaccagtctatgggaagtgaggattggatagctttagtcaaagcagctgctgcagctgcagccaagaacaaaacagggagtaaacctcgaaccagcgctaacagcaataaagata

SEQ ID NO: 822 - DNA, 500 bp, Homo sapiens
gaagttctggctcgttggacagactgtcgctattaccctgccaagattgaagcaattaacaaagaaggaacatttacagttcagttttatgatggagtaattcgttgtttaaaaagaatgcacattaaagccatgcccgaggatgctaaggggcaggtgaaatcccagcatccactaagctggtgttgtcctatcgacccagctggatcgtgtaaccagtctatgggaagtgaggattggatagctttagtcaaagcagctgctgcagctgcagccaagaacaaaacagggagtaaacctcgaaccagcgctaacagcaataaagataaggataaagatgagagaaagtggtttaaagtaccttcaaagaaggaggaaacttcaacttgtatagccacaccagacgtagagaagaaggaagatctgcctacatctagtgaaacatttggacttcatgtagagaacgttccaaagatggtctttccacagccagagagcac

SEQ ID NO: 823 - DNA, 49 bp, Homo sapiens
gaagttctggctcgttggacagactgtcgctattaccctgccaagattg

SEQ ID NO: 824 - DNA, 178 bp, Homo sapiens
aaagcagctgctgcagctgcagccaagaacaaaacagggagtaaacctcgaaccagcgctaacagcaataaagataaggataaagatgagagaaagtggtttaaagtaccttcaaagaaggaggaaacttcaacttgtatagccacaccagacgtagagaagaaggaagatctgccta

SEQ ID NO: 825 - DNA, 500 bp, Homo sapiens
ctgttggggttgatggtgctgaaaaaaaggaagactacaatgaaacagctccaatgctggagcaggcgatttcacctaaacctcaaagtcagaaaaaaaatgaagctgacattagcagttctgccaacactcagaaacctgcactgttatcctcaactttgtcttcagggaaggctcgcagcaagaaatgcaaacatgaatctggagattcttctgggtgtataaaaccccctaaatcaccactttccccagaattaatacaagtcgaggatttgacgcttgtatctcagctttcttcttcagtgataaataaaactagtcctccacagcctgtgaatccccctagacctttcaagcatagtgagcggagaagaagatctcagcgtttagccaccttacccatgcctgatgattctgtagaaaaggtttcttctccctctccagccactgatgggaaagtattctccatcagttctcaaaatcagcaagaatcttcagta

SEQ ID NO: 826 - DNA, 500 bp, Homo sapiens
atgatagatacaatcagtttcacataaggagatttgaagcattacttcaaactggaaaaagtcccacttctgaattactgtttgactggggcaccacaaattgcacagttggtgatcttgtggatcttttgatccaaaatgaattttttgctcctgcgagtcttttgctcccagatgctgttcccaaaactgctaatacactaccttctaaagaagctataacagttcagcaaaaacagatgcctttctgtgacaaagacaggacattgatgacacctgtgcagaatcttgaacaaagctatatgccacctgactcctcaagtccagaaaataaaagtttagaagttagtgatacacgttttcacagtttttcattttatgaattgaagaatgtcacaaataactttgatgaacgacccatttctgttggtggtaataaaatgggagagggaggatttggagttgtatataaaggctacgtaaataacacaactgtggca

SEQ ID NO: 827 - DNA, 25 bp, Homo sapiens
gtgggaattcctttggaaacaggac

SEQ ID NO: 828 - DNA, 44 bp, Homo sapiens
aaaagccattcagttatctggagcagaacaactagaagctttga

SEQ ID NO: 829 - DNA, 36 bp, Homo sapiens
tttcttatgaagctacagtcccttttagcaaagcaa

SEQ ID NO: 830 - DNA, 36 bp, Homo sapiens
aaaagaaagtcttaaatggcatgcttcccaagagcc

SEQ ID NO: 831 - DNA, 25 bp, Homo sapiens
aagtgacagatacacttgccaaaga

SEQ ID NO: 832 - DNA, 36 bp, Homo sapiens
gtccgcaacgattgcaaggtgttcagattttgcaaa

SEQ ID NO: 833 - DNA, 277 bp, Homo sapiens
tttggtggggttacacgcgggttcaacatgcgtatcgaaaagtgttatttctgttcggggcccatctatcctggacacggcatgatgttcgtccgcaacgattgcaaggtgttcagattttgcaaatctaaatgtcataaaaactttaaaaagaagcgcaatcctcgcaaagttaggtggaccaaagcattccggaaagcagctggtaaagagcttacagtggataattcatttgaatttgaaaaacgtagaaatgaacctatcaaataccagcgag

SEQ ID NO: 834 - DNA, 50 bp, Homo sapiens
gctacagaaagttcaggatatcaaagaagtcaagcaaaacatccatctta

SEQ ID NO: 835 - DNA, 36 bp, Homo sapiens
gcagaagcttctctcttggtgtgcctagattgatcg

SEQ ID NO: 836 - DNA, 36 bp, Homo sapiens
gcagaaagagtggcagaggatgctgcagctgattca

SEQ ID NO: 837 - DNA, 74 bp, Homo sapiens
caagaagagcattcacttcaagatgtgatatttaaaagtgcttttaaaagtacatcaacagctcttccaccaag

SEQ ID NO: 838 - DNA, 35 bp, Homo sapiens
tggatttagcagaaacaatggttgcatctgcagat

SEQ ID NO: 839 - DNA, 500 bp, Homo sapiens
ccacagcagaaagagtggcagaggatgctgcagctgattcagagtaggctacaagaagagcattcacttcaagatgtgatatttaaaagtgcttttaaaagtacatcaacagctcttccaccaagagaagatgattcatcacagtctccaaatgcatgcagaattcatggccatctatatgtcaataaagtagcagggaattttcacataacagtgggcaaggcaattccacatcctcgtggtcatgcacatttggcagcacttgtcaaccatgaatcttacaatttttctcatagaatagatcatttgtcttttggagagcttgttccagcaattattaatcctttagatggaactgaaaaaattgctatagatcacaaccagatgttccaatattttattacagttgtgccaacaaaactacatacatataaaatatcagcagacacccatcagttttctgtgacagaaagggaacgtatcattaaccatgctgcagg

SEQ ID NO: 840 - DNA, 500 bp, Homo sapiens
tctaatagcatttacaactatggctttattaaccataatggaattctcagtatatcaagatacatggatgaagtatgaatacgaagtagacaaggatttttctagcaaattaagaattaatatagatattactgttgccatgaagtgtcaatatgttggagcggatgtattggatttagcagaaacaatggttgcatctgcagatggtttagtttatgaaccaacagtatttgatctttcaccacagcagaaagagtggcagaggatgctgcagctgattcagagtaggctacaagaagagcattcacttcaagatgtgatatttaaaagtgcttttaaaagtacatcaacagctcttccaccaagagaagatgattcatcacagtctccaaatgcatgcagaattcatggccatctatatgtcaataaagtagcagggaattttcacataacagtgggcaaggcaattccacatcctcgtggtcatgcacatttggcag

SEQ ID NO: 841 - DNA, 500 bp, Homo sapiens
ttctagcaaattaagaattaatatagatattactgttgccatgaagtgtcaatatgttggagcggatgtattggatttagcagaaacaatggttgcatctgcagatggtttagtttatgaaccaacagtatttgatctttcaccacagcagaaagagtggcagaggatgctgcagctgattcagagtaggctacaagaagagcattcacttcaagatgtgatatttaaaagtgcttttaaaagtacatcaacagctcttccaccaagagaagatgattcatcacagtctccaaatgcatgcagaattcatggccatctatatgtcaataaagtagcagggaattttcacataacagtgggcaaggcaattccacatcctcgtggtcatgcacatttggcagcacttgtcaaccatgaatcttacaatttttctcatagaatagatcatttgtcttttggagagcttgttccagcaattattaatcctttagatggaactg

SEQ ID NO: 842 - DNA, 36 bp, Homo sapiens
agcatcactcctgtccttggatctccatccaccaag

SEQ ID NO: 843 - DNA, 500 bp, Homo sapiens
cctaatgaagcattcaaagaagacatatgactcttttcaagatgaacttgaagattatattaaagtacagaaagccagaggcttagagccaaagacttgtttcagaaagatgaaaggggactatttggaaacctgtgggtacaaaggagaggttaattccagacccacgtatagaatgtttgaccagagactcccatctgaaaccatccagacctacccaagatcatgcaatattccacaaacagtggaaaatcggttgcctcagtggttaccagcccatgacagcagattgagactagactctctgagctactgtcagttcacgagggactgtttctcagaaaaaccagtacccctgaactttaatcaacaagaatatatttgtggctcacatggtgtagaacatagagtttacaagcacttctcctcagataacagtaccagtactcatcaagccagtcacaaacagatacatcagaagaggaaaaggcacccagagg

SEQ ID NO: 844 - DNA, 500 bp, Homo sapiens
ttggacaaaaattgatttttgatctctgaattgtggtttttagctcaccagttattgtgtagtctcactatttgaaaattcatgctgaaaaactgagtgaatatgatcagatttctccaccaaattctcagcctgataaggaaaatcccgttttgtcaacctaatgaagcattcaaagaagacatatgactcttttcaagatgaacttgaagattatattaaagtacagaaagccagaggcttagagccaaagacttgtttcagaaagatgaaaggggactatttggaaacctgtgggtacaaaggagaggttaattccagacccacgtatagaatgtttgaccagagactcccatctgaaaccatccagacctacccaagatcatgcaatattccacaaacagtggaaaatcggttgcctcagtggttaccagcccatgacagcagattgagactagactctctgagctactgtcagttcacgagggactgtttctcag

SEQ ID NO: 845 - DNA, 36 bp, Homo sapiens
tttcttgtaacattgcagtttggaccagaaaatccc

SEQ ID NO: 846 - DNA, 51 bp, Homo sapiens
gttcaccttgaccctgccgtcaaagaagttcagtataatcctacctatgag

SEQ ID NO: 847 - DNA, 36 bp, Homo sapiens
ccatgtccggccgcgaaggtggcaagaagaagccac

SEQ ID NO: 848 - DNA, 75 bp, Homo sapiens
ggggaagcggcggcaggcgccatgtccggccgcgaaggtggcaagaagaagccactgaaacagcccaagaagcag

SEQ ID NO: 849 - DNA, 26 bp, Homo sapiens
cactgaaacagcccaagaagcaggcc

SEQ ID NO: 850 - DNA, 52 bp, Homo sapiens
cagaaacaaaaagaggagcagaagaaactcgaggagctaaaagcgaaggccg

SEQ ID NO: 851 - DNA, 25 bp, Homo sapiens
ggggaccttccttggagcagaggtt

SEQ ID NO: 852 - DNA, 500 bp, Homo sapiens
gaaatatgtttcaacatctgaatcagatggtacagattgctgcagtggaaaatcaggtgaagaagaaaacattttctcgaaagaatcattcaaacttatggaaactcaacaagaagaggaaacagagaagaaagacagcagaaaattatttcaggaaggtgataagtggctaacagaagaggcacagagtgaacagcaaacaaatattgaacaggaagtatcactggacctgattttagtagaagagtatgactcattaatagaaaagatgagcaactggaattttccaatttttgaacttgtagaaaagatgggagagaaatcaggaaggattctcagtcaggttatgtataccttatttcaagacactggtttattggaaatatttaaaattcccactcaacaatttatgaactattttcgtgcattagaaaatggctatcgagacattccttatcacaatcgtatacatgccacagatgtgctacatgcagtttggt

SEQ ID NO: 853 - DNA, 500 bp, Homo sapiens
tctcgaaagaatcattcaaacttatggaaactcaacaagaagaggaaacagagaagaaagacagcagaaaattatttcaggaaggtgataagtggctaacagaagaggcacagagtgaacagcaaacaaatattgaacaggaagtatcactggacctgattttagtagaagagtatgactcattaatagaaaagatgagcaactggaattttccaatttttgaacttgtagaaaagatgggagagaaatcaggaaggattctcagtcaggttatgtataccttatttcaagacactggtttattggaaatatttaaaattcccactcaacaatttatgaactattttcgtgcattagaaaatggctatcgagacattccttatcacaatcgtatacatgccacagatgtgctacatgcagtttggtatctgacaacacggccagttcctggcttacagcagatccacaatggttgtggaacaggaaatgaaacagattct

SEQ ID NO: 854 - DNA, 36 bp, Homo sapiens
agaaaagcacaattacaggttgacagatttgcaatg

SEQ ID NO: 855 - DNA, 500 bp, Homo sapiens
acctctagaaatgtctcataagaagagtttctttgataaaaaacgatcagaaaggaaatggagtcaccaagatacatttaaatgtgaagccgtgaataaacaaagtttccagacatcacaaccattccaagttttaaagaagaagatgaatgagaatttggaaatatcagagaattcagatgactgtcagatacttacctgtcctgtttgctttagggctcaagggtgcatcagtctggaagccttgaataaacatgtagatgaatgtcttgatggaccttcaatcagtgaaaactttaaaatgttctcgtgttcacatgtttctgctaccaaagttaacaagaaagaaaatgttcctgcttcttcactttgtgagaagcaagattatgaagcccatccaaaaattaaagaaatatcttcagtagattgtatagctttagtagatactatagataactcatctaaagcagaaagcatagatgctttaagtaataagcata

SEQ ID NO: 856 - DNA, 136 bp, Homo sapiens
aagttgaagaatgtgaattttgaagtaaaaactcgtgcatctacagtttcatctgttgtttctactgcagaagaaatatttgccattgctaaggaattgctaaaaacagaaattgatgctgattttccacatccct

SEQ ID NO: 857 - DNA, 102 bp, Homo sapiens
gggtccagattttatggaaatgagctcaagaaagaaaagcaagtcaaccaacgaattgaaaatatgatgcaacaaaaagctcaaatcaccagccaacagcta

SEQ ID NO: 858 - DNA, 500 bp, Homo sapiens
caatagacaagctgtgatggacttcatcaaggatttacccattagaaaggtttctggaataggaaaagttacagagaaaatgttaaaggcccttggaattattacatgtacagaactttaccaacagagggcattgctttctctccttttctctgaaacatcttggcattatttccttcatatctccttgggtctaggttcaacacacctgacgagggatggagagaggaaaagtatgagcgttgagaggacattcagtgagataaataaagcggaagagcaatacagcctatgtcaagaactttgcagtgagcttgctcaggatctacagaaagaaagacttaagggtagaactgttaccattaagttgaagaatgtgaattttgaagtaaaaactcgtgcatctacagtttcatctgttgtttctactgcagaagaaatatttgccattgctaaggaattgctaaaaacagaaattgatgctgattttccacatccct

SEQ ID NO: 859 - DNA, 36 bp, Homo sapiens
tatttgatgaggactatggtaagtgacatcaaacag

SEQ ID NO: 860 - DNA, 499 bp, Homo sapiens
tctctgtcgtcacagttagttttacatgtggcacccataaaagatgaggctgagaacacggaaagcttctcagcagtcaaatcaaatccaaacacaacgcactgccagagcaaagaggaaatattcagaggttgatgatagtctgccttcaggaggagaaaaaccatcgaagaatgaaaccggcttgttgtcttcaattaaaaaatttattaaaggaagcacacctaaggaagagagagaaaatccttcaaaacggagtagaattgaacgtgatatagataacaatttgatcacgtcaacaccaagagcaggagaaaaacctaacaaacagatatctcgagtaagacggaaaagtcaagtaatggagaagctggtagttatgaaatgacaaatcaacatgtaaaacaaaatggaaaattagaagataatccttcctctggcagtcctccaaggactactttgttggggaccatattttcacctgtcttcaacttttttt

SEQ ID NO: 861 - DNA, 36 bp, Homo sapiens
aaggacaccaagaccacggttgatgctatgaaactg

SEQ ID NO: 862 - DNA, 36 bp, Homo sapiens
aagagtggatgcatcagggtctgtagcatctctgtc

SEQ ID NO: 863 - DNA, 500 bp, Homo sapiens
gaccaggtagatgatcatttacagactccctaccatgaaacagtctactccttgttggatacactcagccccgcctaccgagaagcatttggaaacgcactgcttcaaagactggaagctttgaaaagagatggacagtcatgactacactttttcctttcagaggggctggtgctcgtacagaatgttgatataaagcttaaaattcttgcatatggtcatagaaaatgcatctttggttttgtgtttttatcacttgcttccaacttaggcttttggctcagaagattattgaataatgatttgtcttagtttctgtttcagtaagggaattctgaggccgttgctatgataccatcattaagacattcacatgtcttcatataatatctcttcatttcaaatcctaatcactatttcatactattacagggctttgatgctgccagcactgtcttttacataggaaattctagatttgcacagtaatagaggaatta

SEQ ID NO: 864 - DNA, 62 bp, Homo sapiens
atgctggagcagcctctctgcccactcagccaactcagccatcatcatcttcaacttatgac

SEQ ID NO: 865 - DNA, 500 bp, Homo sapiens
gataatgaagctattactcaagaaatagtgggctgtgcacatttggagaattatgctttgaaaatgtttttgtatgcagacaatgaagatcgtgctggacgatttcacaaaaacatgatcaagtccttctatactgcaagtcttttgatagatgtcataacagtatttggagaactcactgatgaaaatgtgaaacacaggaagtatgccagatggaaggcaacatacatccataattgtttaaagaatggggagactcctcaagcaggccctgttggaattgaagaagataatgatattgaagaaaatgaagatgctggagcagcctctctgcccactcagccaactcagccatcatcatcttcaacttatgacccaagcaacatgccatcaggcaactatactggaatacagattcctccgggtgcgcacgctccagctaatacaccagcagaagtgcctcacagcacaggtgtagcaagtaatactatccaacctac

SEQ ID NO: 866 - DNA, 500 bp, Homo sapiens
tccaacctactccacagactatacctgccattgatcccgcacttttcaatacaatttcccagggggatgttcgtctaaccccagaagactttgctagagctcagaagtactgcaaatatgctggcagtgctttgcagtatgaagatgtaagcactgctgtccagaatctacaaaaggctctcaagttactgacgacaggcagagaatgaagcctttgtatgacagacccatgtatttttggcatgaggaactaacagtccattactctatcttcagcctatcaggatcacagttttaaggaagacttggttttgttgaatatgacaatgaaatctgtgtgtatcagatttttattgaagcattcatcagcagcctcaaccagttttcattgtccatttactagattcaatcgtctctgagtatatagggctgatgttagcaagaccctaaaaatgtccattgaaccctgcttcaaaaaatgaaaacacacctctataaaa

SEQ ID NO: 867 - DNA, 36 bp, Homo sapiens
ggccacgaaatacgagaggcaatccagcatccagca

SEQ ID NO: 868 - DNA, 36 bp, Homo sapiens
ggccacgaaatacgagaggtaaagcgcatttatgta

SEQ ID NO: 869 - DNA, 500 bp, Homo sapiens
tcttcttaaagttttgacatgcacagaccttgagcaggggccaaattttttccttgattttgaaaatgcccagcctacagagtctgagaaggaaatttataatcaggtgaatgtagtattaaaagatgcagaaggcatcttggaggacttgcagtcatacagaggagctggccacgaaatacgagaggcaatccagcatccagcagatgagaagttgcaagagaaggcatggggtgcagttgttccactagtaggcaaattaaagaaattttacgaattttctcagaggttagaagcagcattaagaggtcttctgggagccttaacaagtaccccatattctcccacccagcatctagagcgagagcaggctcttgctaaacagtttgcagaaattcttcatttcacactccggtttgatgaactcaagatgacaaatcctgccatacagaatgatttcagctattatagaagaacattgagtcgtatgaggattaaca

SEQ ID NO: 870 - DNA, 104 bp, Homo sapiens
atgcccagcctacagagtctgagaaggaaatttataatcaggtgaatgtagtattaaaagatgcagaaggcatcttggaggacttgcagtcatacagaggagct

SEQ ID NO: 871 - DNA, 161 bp, Homo sapiens
ctgagaaggaaatttataatcaggtgaatgtagtattaaaagatgcagaaggcatcttggaggacttgcagtcatacagaggagctggccacgaaatacgagaggcaatccagcatccagcagatgagaagttgcaagagaaggcatggggtgcagttgtt

SEQ ID NO: 872 - DNA, 157 bp, Homo sapiens
atacttaaagaatttttcattataaggccattaatgaaacttgtcttgggagaattttgagaagaattagagcaacagttgtgccattgtgtacaggaaaaccacatttcacctctaggtcctacatatcaacaccttgagaacccgttttgctgtc

SEQ ID NO: 873 - DNA, 72 bp, Homo sapiens
ctgagaaggaaatttataatcaggtgaatgtagtattaaaagatgcagaaggcatcttggaggacttgcagt

SEQ ID NO: 874 - DNA, 500 bp, Homo sapiens
tggatgatgcaaaaatttattcgagccatgctaagaaacctaatgttgatgcagatgatgtgagactggcaatccagtgtcgtgctgaccaatcttttacctctcctcccccaagagattttttactggatatcgcaaggcagaaaaatcaaacccctttgccactgattaagccatatgcaggacctagactgccacctgatagatactgcttaacagctccaaactataggctgaagtccttaattaaaaagggacctaaccaagggagactagttccacgattaagtgttggtgctgttagtagcaaacctactactcctactatagcaaccccacaaacggtgtctgtcccaaataaagttgcaactccaatgtcagtgacaagccaaagatttacggtgcagattccaccttctcagtccacacctgtcaaaccagttcctgcaacaactgcagttcaaaatgttctgattaatccttcaatgattgggcccaaa

SEQ ID NO: 875 - DNA, 498 bp, Homo sapiens
ctgaaagccatggaagacggaggcgtcaagcttctgaaagaaagattagagaaattcttccatcggtatttgcaaacgctacatttgcagtcatgtgacctacttgacatttttggtggaatcagcttcttcccgttggataaaatgacttatttgaaaatccagtcctttattaatagaatggaggaaagcctgaatatagtcaaatacactgcttttctctataacgatcagctcatctggagtggattagaacaagatgacatgagaattttatacaaataccttaccacctccctttttccaaggcacatcgaacctgagttagcaggaagggattctccaataagagcagaaatgccaggaaatcttcaacactatggaagatttcttaccggacccttgaacctcaatgatccagatgcaaaatgcagattccccaaaatttttgtaaatacagatgacacttatgaagagctccatttaatcgtttataag

SEQ ID NO: 876 - DNA, 498 bp, Homo sapiens
ctttttaatggtacatttctgaaagccatggaagacggaggcgtcaagcttctgaaagaaagattagagaaattcttccatcggtatttgcaaacgctacatttgcagtcatgtgacctacttgacatttttggtggaatcagcttcttcccgttggataaaatgacttatttgaaaatccagtcctttattaatagaatggaggaaagcctgaatatagtcaaatacactgcttttctctataacgatcagctcatctggagtggattagaacaagatgacatgagaattttatacaaataccttaccacctccctttttccaaggcacatcgaacctgagttagcaggaagggattctccaataagagcagaaatgccaggaaatcttcaacactatggaagatttcttaccggacccttgaacctcaatgatccagatgcaaaatgcagattccccaaaatttttgtaaatacagatgacacttatgaagagctc

SEQ ID NO: 877 - DNA, 36 bp, Homo sapiens
gcggccaagagggcgaacattcgacttccacctgaa

SEQ ID NO: 878 - DNA, 346 bp, Homo sapiens
cgagtctcgctcaggctcggttttaccccggagtctattcgaagggggctgctacgtcagcgcgtctcagcgtaagacggcgctattccgctgtaacagcttccggcgggtcctggatgttgatgtcctgcatctaacgcggtgtaacccccgaagccgagcgagctccggaggaatttcagtatctgctacggtaacttcatcagcccgccaagatggcgatgcaagcggccaagagggcgaacattcgacttccacctgaagtaaatcggatattgtatataagaaatttgccatacaaaatcacagctgaagaaatgtatgatatatttgggaaatatggacc

SEQ ID NO: 879 - DNA, 377 bp, Homo sapiens
ataaaaatgggcagaattttccttgatcatatcggtggtacccgtctgttttcttgtgcaaactgtgatacgatcctgaccaaccgctcagaactcatctccactcgtttcacaggcgccactggcagagcatttctttttaacaaggtagttaacctgcagtacagcgaagttcaagatcgggtcatgctcactggccgccacatggttcgagatgtgagctgcaaaaactgcaatagcaaactgggatggatctatgagtttgccactgaagacagccagcgatataaggaaggccgcgtgatcctggaacgtgctctagttcgagagagtgagggctttgaggagcatgtaccatctgataactcttgaagata

SEQ ID NO: 880 - DNA, 500 bp, Homo sapiens
ataaaaatgggcagaattttccttgatcatatcggtggtacccgtctgttttcttgtgcaaactgtgatacgatcctgaccaaccgctcagaactcatctccactcgtttcacaggcgccactggcagagcatttctttttaacaaggtagttaacctgcagtacagcgaagttcaagatcgggtcatgctcactggccgccacatggttcgagatgtgagctgcaaaaactgcaatagcaaactgggatggatctatgagtttgccactgaagacagccagcgatataaggaaggccgcgtgatcctggaacgtgctctagttcgagagagtgagggctttgaggagcatgtaccatctgataactcttgaagatacagagagaaatccatcttttcccaggtctccttcactgaaaacaaaaatctacttacatacactgtcaccttagcatcagagtcggattaatgaactgcggaacaagaggttgtgagaatcta

SEQ ID NO: 881 - DNA, 500 bp, Homo sapiens
gttccctgcagaagagcacagaagtgatgaaggccatgcaaagtcttgtgaagattccagagattcaggccaccatgagggagttgtccaaagaaatgatgaaggctgggatcatagaggagatgttagaggacacttttgaaagcatggacgatcaggaagaaatggaggaagaagcagaaatggaaattgacagaattctctttgaaattacagcaggggccttgggcaaagcacccagtaaagtgactgatgcccttccagagccagaacctccaggagcgatggctgcctcagaggatgaggaggaggaggaagaggctctggaggccatgcagtcccggctggccacactccgcagctaggggctgcctaccccgctgggtgtgcacacactcctctcaagagctgccattttatgtgtctcttgcactacacctctgttgtgaggactaccattttggagaaggttctgtttgtctcttttcattctctgccca

SEQ ID NO: 882 - DNA, 500 bp, Homo sapiens
ccagtaaagtgactgatgcccttccagagccagaacctccaggagcgatggctgcctcagaggatgaggaggaggaggaagaggctctggaggccatgcagtcccggctggccacactccgcagctaggggctgcctaccccgctgggtgtgcacacactcctctcaagagctgccattttatgtgtctcttgcactacacctctgttgtgaggactaccattttggagaaggttctgtttgtctcttttcattctctgcccaggttttgggatcgcaaagggattgttcttataaaagtggcataaataaatgcatcatttttaggagtatagacagatatatcttattgtggggaggggaaagaaatccatctgctcatgaagcacttctgaaaatataggtgattgcctgaatgtcgaagactctacttttgtctataaaacactatataaatgaattttaataaatttttgctttagcacttggccccattgtaga

SEQ ID NO: 883 - DNA, 500 bp, Homo sapiens
cacagacaggaaacccaagccacattggaagcattgatcctaactgtgatgtggtagcagtggtccaagatgcctttgagtgttcaaggatgctctgtgatcagtattatttatcatctccagaattaaagcttacacaagtgaatggaaaatttccagaccaaccaattcacatcgtgtatgttccttctcacctccatcatatgctctttgaactatttaagaatgcaatgcgggcaacagttgaacaccaggaaaatcagccttcccttacaccaatagaggttattgttgtcttgggaaaagaagaccttaccattaagatttcagacagaggaggtggtgttcccctgagaattattgaccgcctctttagttatacatactccactgcaccaacgcctgtgatggataattcccggaatgctcctttggctggttttggttacggcttgccaatttctcgtctgtatgccaagtactttcaaggagatctgaat

SEQ ID NO: 884 - DNA, 41 bp, Homo sapiens
caattcacatcgtgtatgttccttctcacctccatcatatg

SEQ ID NO: 885 - DNA, 32 bp, Homo sapiens
gatgtcatacagcgcaagagggagctgtggcc

SEQ ID NO: 886 - DNA, 36 bp, Homo sapiens
ccttcatctccaccatcggaattgattttaaaatta

SEQ ID NO: 887 - DNA, 36 bp, Homo sapiens
tactacagaggagccatgggcattatgctggtctat

SEQ ID NO: 888 - DNA, 207 bp, Homo sapiens
aagattccgaacaatcacgacagcgtactacagaggagccatgggcattatgctggtctatgacatcacaaatgaaaaatcctttgacaatattaaaaattggatcagaaacattgaagagcatgcctcttccgatgtcgaaagaatgatcctgggtaacaaatgtgatatgaatgacaaaagacaagtgtcaaaagaaagagggga

SEQ ID NO: 889 - DNA, 272 bp, Homo sapiens
gaacgatagaactagatggaaagaaaattaagcttcagatatgggacacagcgggtcaggaaagattccgaacaatcacgacagcgtactacagaggagccatgggcattatgctggtctatgacatcacaaatgaaaaatcctttgacaatattaaaaattggatcagaaacattgaagagcatgcctcttccgatgtcgaaagaatgatcctgggtaacaaatgtgatatgaatgacaaaagacaagtgtcaaaagaaagaggggagaag

SEQ ID NO: 890 - DNA, 25 bp, Homo sapiens
aagattccgaacaatcacgacagcg

SEQ ID NO: 891 - DNA, 402 bp, Homo sapiens
ggcggattggcgggcacgccccctcgcccgcggccccctccccgcctctctccaccgcctcctctggctccccggtcagagggccggagcgagaagatggcgaagacgtacgattatctcttcaagctcctgctgatcggcgactcgggggtaggcaagacctgcctcctgttccgcttctcagaggacgccttcaacaccaccttcatctccaccatcggaattgattttaaaattagaacgatagaactagatggaaagaaaattaagcttcagatatgggacacagcgggtcaggaaagattccgaacaatcacgacagcgtactacagaggagccatgggcattatgctggtctatgacatcacaaatgaaaaatcctttgacaatattaaaaattgg

SEQ ID NO: 892 - DNA, 36 bp, Homo sapiens
agcacgccatgaaacaggccgtcatggaaatgatga

SEQ ID NO: 893 - DNA, 99 bp, Homo sapiens
acgtccattgctcagctcaaagtggtacagaccaagtatgtggaagccaaggactgtctgaacgtgctgaacaagagcaacgaggggaaagaattactc

SEQ ID NO: 894 - DNA, 89 bp, Homo sapiens
agagacttcctcttcgttaagtcggccttcccaacatggcgcagtctattaacatcacggagctgaatctgccgcagctagaaatgctc

SEQ ID NO: 895 - DNA, 192 bp, Homo sapiens
agagacttcctcttcgttaagtcggccttcccaacatggcgcagtctattaacatcacggagctgaatctgccgcagctagaaatgctcaagaaccagctggaccaggaagtggagttcttgtccacgtccattgctcagctcaaagtggtacagaccaagtatgtggaagccaaggactgtctgaacgtgc

SEQ ID NO: 896 - DNA, 26 bp, Homo sapiens
aagaattactcgtcccactgacgagt

SEQ ID NO: 897 - DNA, 80 bp, Homo sapiens
ctcttcgttaagtcggccttcccaacatggcgcagtctattaacatcacggagctgaatctgccgcagctagaaatgctc

SEQ ID NO: 898 - DNA, 67 bp, Homo sapiens
acgtccattgctcagctcaaagtggtacagaccaagtatgtggaagccaaggactgtctgaacgtgc

SEQ ID NO: 899 - DNA, 183 bp, Homo sapiens
ctcttcgttaagtcggccttcccaacatggcgcagtctattaacatcacggagctgaatctgccgcagctagaaatgctcaagaaccagctggaccaggaagtggagttcttgtccacgtccattgctcagctcaaagtggtacagaccaagtatgtggaagccaaggactgtctgaacgtgc

SEQ ID NO: 900 - DNA, 63 bp, Homo sapiens
cttcccaacatggcgcagtctattaacatcacggagctgaatctgccgcagctagaaatgctc

SEQ ID NO: 901 - DNA, 40 bp, Homo sapiens
taacatcacggagctgaatctgccgcagctagaaatgctc

SEQ ID NO: 902 - DNA, 70 bp, Homo sapiens
gacttcttcaagaggaagatagattttctaaccaagcagatggagaaaatccaaccagctcttcaggaga

SEQ ID NO: 903 - DNA, 299 bp, Homo sapiens
agagacttcctcttcgttaagtcggccttcccaacatggcgcagtctattaacatcacggagctgaatctgccgcagctagaaatgctcaagaaccagctggaccaggaagtggagttcttgtccacgtccattgctcagctcaaagtggtacagaccaagtatgtggaagccaaggactgtctgaacgtgctgaacaagagcaacgaggggaaagaattactcgtcccactgacgagttctatgtatgtccctgggaagctgcatgatgtggaacacgtgctcatcgatgtgggaact

SEQ ID NO: 904 - DNA, 164 bp, Homo sapiens
gtcagaagattcagcagctcacagccctgggggcagctcaggctactgctaaggcctgagagtttttgcagaaatggggcagagggacaccctttgggcgtggcttcctggtgatgggaagggtcttgtgttttaatgccaataaatgtgccagctgggcagaa

SEQ ID NO: 905 - DNA, 51 bp, Homo sapiens
ggttgtgcttccggtgcggaggtcagggacaagatggtgccaccggtgcag

SEQ ID NO: 906 - DNA, 51 bp, Homo sapiens
tgagagggggatgcccctggccctgcctcactgtgacctgctcctgcccac

SEQ ID NO: 907 - DNA, 463 bp, Homo sapiens
agctctgaaggtgatcaggctgcaggaagaagaagggacacctttcacagctatcagggaagcttctcttttaaaaggactaaaacatgctaacatagtgctacttcatgacatcatccataccaaggagacgctgacacttgtgtttgaatatgtgcacactgatttatgtcagtacatggacaagcaccctggggggctgcatccagataatgtgaagttgtttttatttcagttgctgcgaggtctgtcttacatccaccagcgttatattttgcacagagacctgaaaccacagaaccttctgatcagtgacacgggggagttaaagctggcagatttcggtcttgcaagagcaaaatccgtccctagccacacatactccaacgaagtggttaccttgtggtacagacctccagatgtccttctaggctcaacagaatattccacctgccttgacatg

SEQ ID NO: 908 - DNA, 36 bp, Homo sapiens
ctcgggactgagtgcaagaatcagcatgattcttca

SEQ ID NO: 909 - DNA, 77 bp, Homo sapiens
agagcggaggtggtggcggcggaggctttggcagctcgggactgagtgcaaggaatatgcactgaagaggcagcgaa

SEQ ID NO: 910 - DNA, 36 bp, Homo sapiens
atttagtacaagatggaactggaatgaatggctgaa

SEQ ID NO: 911 - DNA, 108 bp, Homo sapiens
actaccagtaaaataccctgacctgcccaggaatgcccaagtggccctcaccatatgggatgtgtatggtcccggaaaagcagtgcctgtaggaggaacaacggtttc

SEQ ID NO: 912 - DNA, 94 bp, Homo sapiens
gcatgacttgaaagtctggcctaatgtagaagcagatggatcagaacccacaaaaactcctggcagaacaagtagcactctctcagaagatcag

SEQ ID NO: 913 - DNA, 441 bp, Homo sapiens
atgttgtttttcctgtacctaagttcccgctgtaggtggtacctttgcagacggtgcgatgggggaagcagagaagtttcactacatctatagttgtgacctggatatcaacgtccagcttaagataggaagcttggaagggaagagagaacaaaagagttataaagctgtcctggaagacccaatgttgaagttctcaggactatatcaagagacatgctctgatctttatgttacttgtcaagtttttgcagaagggaagcctttggccttgccagtgagaacatcctacaaagcatttagtacaagatggaactggaatgaatggctgaaactaccagtaaaataccctgacctgcccaggaatgcccaagtggccctcaccatatgggatgtgtatggtcccggaaaagcagtgcctgtaggaggaacaacggtttc

SEQ ID NO: 914 - DNA, 36 bp, Homo sapiens
ttttctatggagtcacaggtaagtgctaaaatggag

SEQ ID NO: 915 - DNA, 36 bp, Homo sapiens
ggtggcaatgcagtaaaggtcagacacattctatgt

SEQ ID NO: 916 - DNA, 149 bp, Homo sapiens
ggctggtatccaaccagtctgttaggaatcgccaggaaggcctcatgattgcttcatcgctgctcaatgaggggtatctgcagcctgctggagacatgtccaagagtgcagtggatggaactgctgaaaaccctttcctggacaaccct

SEQ ID NO: 917 - DNA, 500 bp, Homo sapiens
ttctacattcaggcttataaagcactgaagcataagacagcaaatatggacgtactgattgtgctggcaaccaccattgcatttgcctactctttgattattcttctagttgcaatgtatgagagagccaaagtgaaccctattactttctttgacacaccccctatgctgtttgtgtttattgcactaggccgatggctggaacatatagcaaagggcaaaacatcagaggctcttgcaaagttaatttcactacaagctacagaagcaactattgtaactcttgattctgataatatcctcctcagtgaagaacaagtggatgtggaacttgtacaacgtggagatatcattaaagtagttccaggaggcaaatttccagtggatggtcgtgttattgaaggacattctatggtagatgagtccctcatcacaggggaggcaatgcctgtggctaagaaacctggcagcacagtgattgctggttccattaaccagaa

SEQ ID NO: 918 - DNA, 140 bp, Homo sapiens
aacagtattttccttttcaacacatctattgaaagtgttggataaatgcaggatgttaatatgctataaacataaagtctgtttttaaaaaatagcatttgaaaatcatgaagggctttttgttttcttttgtttgtata

SEQ ID NO: 919 - DNA, 36 bp, Homo sapiens
gagttgttgagagtagcacaaatcctgaaggaaccc

SEQ ID NO: 920 - DNA, 75 bp, Homo sapiens
ggtattgaaggtcgctatgccacagctctttattctgctgcatcaaaacagaataagctggagcaagtagaaaag

SEQ ID NO: 921 - DNA, 500 bp, Homo sapiens
aacaaattataagcctgcaaaccaatgataatgatgaacgcagcccagaatcgagtattcttgatggaatgataagacagttgcagcagcagcaagatcagagaatgggagcagatcaggatactattccaagaggactttcaaatggtgaagaaacaccccggagaggttttagaaggctgagcttagacattcagtcccctccaaatattggtctgcgtcgtagtggacaagttgaaggtgttcgtcagatgcatcaaaacgctccacgcagtcagattgctacagaacgtgacctgcaggcttggaaacgaagagtggttgtaccagaggtaccactaggcatatttaggaagctggaagacttccgattagagaaaggtgaagaggaaagaaatctttatataataggaagaaaaagaaagactcttcagctctcacataagtcggattcagtggttttggtatcacagtctagacaaaggacatgtaggcgtaaa

SEQ ID NO: 922 - DNA, 132 bp, Homo sapiens
atgagtggatgccaacaaaagagaacttacgttccttcacaaaggatgctcatgctttaatttataaagatcttccatttgaaactctggaagttgaagcaaaagtggcattggaaatatttcaacacagca

SEQ ID NO: 923 - DNA, 378 bp, Homo sapiens
tcttgcacaccaaatcattaaggggccataaagactgctttgaaaaataccatttaattgcaaaccagggttgtcctcgatctaagctttcaaaaagtacttatgaagaagttaaaaccattttgagtaagaagataaactggattgtgcagtatgcacaaaataaggatctggattcagattctgaatgttctaaaaacccccagcatcatctgtttaatttcaggcataagccagaagaaaaattactcccacagtttgagtcccaagtaccaaaatattctgcaaaatggatagatggaagtgcaggtggcatctctaactgtacacaaagaattttggagcagagggaaaatacagactttggactttctatgt

SEQ ID NO: 924 - DNA, 500 bp, Homo sapiens
gctactcgccaacgtcacctgcctacgagccccgctctcctgggggctacacaccccagagtccctcttattcccccacttcaccctcctactcccctacctctccatcctattctccaaccagtcccaactatagtcccacatcacccagctattcgccaacgtcacccagctactcaccgacctctcccagctactcacccacctctcccagctactcgcccacctctcccagctattcgcccacctctcccagctactcacccacttcccctagctattcgcccacttcccctagctactcgccaacgtctcccagctactcgccgacatctcccagctactcgccaacttcacccagctattctcccacttctcccagctactcacctacctctccaagctattcacccacctcccccagctactcacccacttccccaagttactcacccaccagcccgaactattctccaaccagtcccaattacaccccaaca

SEQ ID NO: 925 - DNA, 500 bp, Homo sapiens
tatgatcagagatattcgagagagggagattcggatctatacggatgcaggccgtatttgtagaccacttctgattgtggaaaaacaaaagctacttttgaagaagaggcatattgaccaattgaaagagagagaatataacaactatagttggcaggatcttgtggccagtggggtagtggagtatattgataccctggaagaagaaacagtgatgcttgcaatgactccagatgatttacaggagaaagaagtagcttattgttccacatatacacactgtgagattcatccctcaatgatccttggtgtctgtgcatctattattccctttcctgatcataaccagtcccctagaaacacataccagtctgctatgggtaagcaggctatgggagtttacatcaccaacttccatgttcgcatggacacattggcccatgttctctattatcctcaaaagccacttgtgactacacggtctatggaatatctacgat

SEQ ID NO: 926 - DNA, 112 bp, Homo sapiens
cccctccccaccaaataaacatgatatttcattctctgtccagcagtcatgaaccccttcacctccaatgacctgatcatttagtttggtgggggtgggggtgggggtgggg

SEQ ID NO: 927 - DNA, 36 bp, Homo sapiens
tgatatatatctgtggagagtgtcacacagaaaatg

SEQ ID NO: 928 - DNA, 36 bp, Homo sapiens
tacttctcaggccatgagactcctggagaaggagag

SEQ ID NO: 929 - DNA, 500 bp, Homo sapiens
cataaaatcatggaatttatcagatccgagaaagcaaagccagatcatgatccaaacaccagacactgtctttatggtttagatgctgacttgattatgcttggattaacaagtcatgaggcacatttttctctcttaagagaagaagttcgatttggtggcaaaaaaacacaacgggtatgtgctccagaagaaactacatttcaccttctacacttgtctttaatgagagagtatattgactatgagttttcagtattaaaagaaaagatcacatttaaatatgatattgaaaggataatagatgattggattttgatggggtttcttgttggtaatgattttatccctcatctacctcatttacatattaatcatgatgcactgcctcttctttatggaacatatgttaccatcctgccagaacttgggggttatattaatgaaagtgggcacctcaacttacctcgatttgagaaataccttgtgaaactatcaga

SEQ ID NO: 930 - DNA, 36 bp, Homo sapiens
aaaaatcagctgcacaaagttaaaaacacaaagtca

SEQ ID NO: 931 - DNA, 262 bp, Homo sapiens
tggaaatccaaataaacggaatgtgcacaatgaaacatctatgcatttgttgtgtatgggacctcaaattatgatatctgaaggagcccttcatcctcgcttggcacgccccacagaagatgatttcagaagagcagattgtctgcagatgatcttaaaatggaaaggagcaaaacttgaccagggtgaatatgagagagcagctattgatgctgttgataacaaaaaaaacacacccttgcactatgctgctgcctcaggg

SEQ ID NO: 932 - DNA, 500 bp, Homo sapiens
aagaaaaattcagtgtttgaaagacttcaaattgatattcaacacttgtgtttgaacaagattcctgtgctaagagaagaaaaactacctgtggtaggaattggaaagcatctgtgtggtatggcaacagatcttgcattacgatgtttggttgaaacctatgctgccagttttgaggaaaggaatgaagaacctttagccaaacgcataaagaatgataaaacagaaaaagaaatttacactttggccaaggaaggaaatgaaaaaaatgtcccagagaagtggaaccctgtggctggcattgttattgcactctgttgtcaccacaggtgtgattggagacattatgtgggcaaagaatatttcagggctctaggccttggagcagtggaattccattatttccagcgaatgagtagttgggcaacttgtgggatgcggaaaacatctttggaaacctcaaatagtaccacaaagaggcaagataatcagaatgatga

SEQ ID NO: 933 - DNA, 45 bp, Homo sapiens
atataattatagaggaccacgaacaaaagatgatattattgagtt

SEQ ID NO: 934 - DNA, 109 bp, Homo sapiens
ggcaaagcttccttttacccctctttcttacatccaaggactgtctcatcgaaatctgctgggagatgacaccacagactgttccttcattttcctgtatattctctgt

SEQ ID NO: 935 - DNA, 36 bp, Homo sapiens
tcctgaattgtgttgcagggatgctgtgcaagattt

SEQ ID NO: 936 - DNA, 135 bp, Homo sapiens
atagaaacaaaagaagagatgggtgactatatccgctcctactctgtatcccagttccagaagacttacagtctccctgaggatgatgacttcataaagagaaaagaaaaggccatcaagacagttgtggacctc

SEQ ID NO: 937 - DNA, 36 bp, Homo sapiens
gtccttagagctcattcagtaagtcagacaatttac

SEQ ID NO: 938 - DNA, 500 bp, Homo sapiens
gaaggagaaatatataccaaactgaatcaaaaaattgatgaatttgttcagcttgctgattatgactggacaatgtctgagccagatggaagagctagtggttatttaatggaccttataaattttttgagaagcatctttcaagtgtttactcatttgcctgggaaagttgctcagacagcttgcatgtcagcctgccagcatctgtcaacatccttaatgcagatgctactggacagtgagttaaaacaaataagcatgggagctgttcagcagtttaacttagatgtcatacagtgtgaattgtttgccagctctgagcctgtgccaggattccagggggataccctgcagctagcattcattgacctcagacaactccttgacctgtttatggtttgggattggtctacttacctagctgattatgggcagccagcttctaagtaccttcgggtgaatccaaacacagcccttactcttttggagaagatgaagga

SEQ ID NO: 939 - DNA, 36 bp, Homo sapiens
gagcgggtgctgctagcggaggcgccatattggagg

SEQ ID NO: 940 - DNA, 500 bp, Homo sapiens
tggaggggacaaaactccggcgacagcgagtgacacaaataaacccctggacccccttgttccctcagctctaagggccgcgatgttgtacctagaagactatctggaaatgattgagcagcttcctatggatctgcgggaccgcttcacggaaatgcgcgagatggacctgcaggtgcagaatgcaatggatcaactagaacaaagagtcagtgaattctttatgaatgcaaagaaaaataaacctgagtggagggaagagcaaatggcatccatcaaaaaagactactataaagctttggaagatgcagatgagaaggttcagttggcaaaccagatatatgacttggtagatcgacacttgagaaagctggatcaggaactggctaagtttaaaatggagctggaagctgataatgctggaattacagaaatattagagaggcgatctttggaattagacactccttcacagccagtgaacaatcaccatgctcatt

SEQ ID NO: 941 - DNA, 191 bp, Homo sapiens
aatactggagccgctactaccaaggatctcaaggggtaatatttgtattagacagtgcctcttcagaggatgatttagaagctgctagaaatgagctgcactcagctcttcagcatccacagttatgcactttaccctttttaatattggccaatcatcaagacaagccagcagctcgctcagtacaagag

SEQ ID NO: 942 - DNA, 173 bp, Homo sapiens
aatactggagccgctactaccaaggatctcaaggggtaatatttgtattagacagtgcctcttcagaggatgatttagaagctgctagaaatgagctgcactcagctcttcagcatccacagttatgcactttaccctttttaatattggccaatcatcaagacaagccagca

SEQ ID NO: 943 - DNA, 170 bp, Homo sapiens
accccagctcatattcaaggggactaaagaatggtgcactcagtcgaggtattactgctgcattcaagcctacaagtcaacactacacgaatccaacatcaaatccagtgcctgcctcaccaataaattttcatcctgagtctagatcttcagatagttctgttattgtt

SEQ ID NO: 944 - DNA, 500 bp, Homo sapiens
aaacagaaatgaaaattgcttttggaaacctttggatggagatcctgtacctgaaaccaccatggactctactacatttactacagtgctttaaaaaacattggttggctgtatttggattagttatggaaaagaacttgcttttaactattgagagcctatacaaaaatctccgtaaagctaataaggcagtggattttacaacagtcaaattcttgcttcaggattctagaagtttgttacatgctttcagtacaaggtcaaattatgatggtattcttccacagacctttgctcaagtaaacaacctccttcagacatttgcagaggtcaagacaaaacttaagccaaattcttcagaaaacacagtgactaaaaagcaggaaggtacttcattgaagaattctcataatcaagaaatcactgttttctcgagttctcatcttccccaacccagcaggcatcaagaaatctggtctatcctagagagtgtttggatt

SEQ ID NO: 945 - DNA, 500 bp, Homo sapiens
accccagcaagttctactagttcgtcttctataagatcagtttcatcagaaaagagaaaactgaaatcagatcatacagatgttctgtactataatataaaaagaagacaaggactgaaaagattgagtgtagaaattgacactctcagaaggagaccaaaaatcggttcttcatcccaaagacctattaaactcaaagaagcatcatattcaaatgataatcaaattattttgcagagtccttcttcaaatggaactaaaaaagacatacataaatgtgtagactttaaacctaaagatatcaaattgacaaatgctgggagcaagcttgaccatggagttaaaagccttagtagtcctaagattgccagtgatgtgaaacctaaagccgaaggccaggcaagtgaaaataaatggtctcatttacttgttcagagagagaagatgaaagaactcaagaaaggaagaaacagtaaatttagagacaattctgaaaaatg

SEQ ID NO: 946 - DNA, 500 bp, Homo sapiens
atccaggatgcagatcaagagatgcagatagtagaagagcttcatgctgcacgtgtgggaaaaagtgtggatttacctggagagttaatgagtatggaaattgacttagaagatgatgtacattcctcctctgcaaataatacttcagacagaaagcttctaattgttattgacacaaatattctgatgaatcatctcaaatttgttagaattttgaagacaacagaagtaccaggttttgacaaacttgtgttaataattccctgggtcgttatgcaagagctagatcgtatgaaggaaggaaaactactaaaacgtgcccagcacaaagctatacctgcagttcatttcatcaacgacagtctcaaaaatcaagatagaaagctatggggtcagtcaatacaacttgcatcccaaaaacattatggattgagtgatgagaacaatgatgatcgagtactaaaatgctgtctccagcaccaggaattattcccttgttc

SEQ ID NO: 947 - DNA, 500 bp, Homo sapiens
aagaacttgcttttaactattgagagcctatacaaaaatctccgtaaagctaataaggcagtggattttacaacagtcaaattcttgcttcaggattctagaagtttgttacatgctttcagtacaaggtcaaattatgatggtattcttccacagacctttgctcaagtaaacaacctccttcagacatttgcagaggtcaagacaaaacttaagccaaattcttcagaaaacacagtgactaaaaagcaggaaggtacttcattgaagaattctcataatcaagaaatcactgttttctcgagttctcatcttccccaacccagcaggcatcaagaaatctggtctatcctagagagtgtttggattacaatatatcagaacagcacggatgtatttcaaagattgggctcaaattcagctctgactacttcaaatatagcatcatttgaagaagcatttatatgtcttcaaaagttaatggcagctgtgagggatat

SEQ ID NO: 948 - DNA, 121 bp, Homo sapiens
atgaaggcttgggagttgatctctctttcattggctctcatgcttttgctcgaatggaaggagatattgacaagcaaagaaaactgatccttcagggacaattatcagaggcagctctgca

SEQ ID NO: 949 - DNA, 379 bp, Homo sapiens
agacgaacccggaagtgagatgcaaggcggcgattttcccttctgtcagatcttgatgaacaaagcagtcataattcatctctagaaagatttatatcctggcatttgaaatgctttttatttagaatagtagtaaaaaatggaaaaagaaaaaggaaatgatgatggaataccagaccaagagaattccttggatttttctgaacactttaaccaacttgaattgttggaaacacatggacaccttattcctactggtactcaaagtctttgggtaggcaattctgatgaagatgaggagcaagatgacaaaaatgaagagtggtatcgattgcaagaaaaaaaaatggaaaaagacccaagcagattgcttctttgg

SEQ ID NO: 950 - DNA, 87 bp, Homo sapiens
gatgaggagcaagatgacaaaaatgaagagtggtatcgattgcaagaaaaaaaaatggaaaaagacccaagcagattgcttctttgg

SEQ ID NO: 951 - DNA, 240 bp, Homo sapiens
gagatgcaaggcggcgattttcccttctgtcagatcttgatgaacaaagcagtcataattcatctctagaaagatttatatcctggcatttgaaatgctttttatttagaatagtagtaaaaaatggaaaaagaaaaaggaaatgatgatggaataccagaccaagagaattccttggatttttctgaacactttaaccaacttgaattgttggaaacacatggacaccttattcctact

SEQ ID NO: 952 - DNA, 36 bp, Homo sapiens
tagtgcagttgtttggagttgcgtgttgtatcacaa

SEQ ID NO: 953 - DNA, 500 bp, Homo sapiens
aagtcaattttgtgagaaaatgcattgcaacagacacaagccagtacgatttgtggggaaagctgatatgcagtaacttcaaaatctcctttattacagatgacccaatgccattacagaaattccattacagaaaccttcttcttggtgaacacgatgtccctttaacatgtattgagcaaattgtcacagtaaacgaccacaagaggaagcagaaagtcctaggccccaaccagaaactgaaatttaatccaacagagttaattatttattgtaaagatttcagaattgtcagatttcgctttgatgaatcaggtcccgaaagtgctaaaaaggtatgccttgcaatagctcattattcccagccaacagacctccagctactctttgcatttgaatatgttgggaaaaaataccacaattcagcaaacaaaattaatggaattccctcaggagatggaggaggaggaggaggaggaggtaatggagctggtggtggc

SEQ ID NO: 954 - DNA, 500 bp, Homo sapiens
tgagctgttgtgtagcttctcttgttcaagtgatgctggatccctattttaggacaattactggatttcagagtctgatacagaaggagtgggtcatggcaggatatcagtttctagacagatgcaaccatctaaagagatcagagaaagagtctcctttatttttgctattcttggatgccacctggcagctgttagaacaatatcctgcagcttttgagttctccgaaacctacctggcagtgttgtatgacagcacccggatctcactgtttggcaccttcctgttcaactcccctcaccagcgagtgaagcaaagcacggtcagtaggataaaaagttgtacaaaacaagattattttccttcacgagtttgaagtttctggtcacaattcattgatgtagaggatttatgactaagcagggtctcaagccaaacttgaaaccattctgaaccaaagtgccatttcacccacctcgaaccaacaacagaagctgac

SEQ ID NO: 955 - DNA, 36 bp, Homo sapiens
gaagcttgttatgctcagaccattccaacaaaagac

SEQ ID NO: 956 - DNA, 500 bp, Homo sapiens
tatttacaaaaggagcacccagtgaattggcacaagaactatgccatcgcctgtgagcggatgctgcgtcttcaggcaagagatgcagatcctgaagtgctgttatcggaaaccatcagacatttccgtctgtactctcagaaagcaccgaatgacccacagcaagctgatattttaggtgctctaaagcacctaagaaaagaactgcaaagtctgagaaataggaaaaatgtctgagacagcaaaatatgaaaaacctgctcatcgttcagcttccaaaattctgaagtctggaagtttttccttcaagaaaagaaactgcataaaaaatttaaaactaagtcatctcccagatataagtatcatggtccagcagtactgtttaatggggtattcagtgactaaggtctgctatttatgcaaaattctgtttatcccgtgttaccaaattaccatttcagtgagaagcttttgaaaagtcttctgacttccagtctttc

SEQ ID NO: 957 - DNA, 436 bp, Homo sapiens
atgggcaagttcataaaacctgggaaagtagtgttggtccaggccagacactacaccggatgctactctggatgcaaaaccatcatcgtgaagaacattgatgatggcaccttagaatgccccgtcagctgttctctggtggctggaattgactgttatccttgcaaggtgacagctgccatgggcaagaagagcacccagaggtcaaagaccaagtcttttgtgaaagtttataactacaatcatctcatgcccacaaggcactctgtggatacccccttggacaaaactgtcatcaacaaggatgtcttcagagaccctgctcttaaacacaaggcccaaaggaaggccaaagtcaaaatcaaagagaggttaattaacgctttccccaatgtacatactgatcatttcttgctatcacaaactatcctagagg

SEQ ID NO: 958 - DNA, 36 bp, Homo sapiens
ccttttctcttcctgtagggtgctggagatctagaa

SEQ ID NO: 959 - DNA, 282 bp, Homo sapiens
gcaaagtgagaacctcaaacatcccaaagctaagttggataacttggatgaagaatgggccacagaacatgcctgccaggtatccagaatgctaccagggggacttttagttcttggagtatttattattactactttagaactggcaaatgattttcaaaatgccctgcgtagactaatgtttgctgtggaaaagtctataaatagaaagagattgtggaatttcacagaggaggaagtctcagaacgagtgacacttcacatttgtgcttctacaaaaaa

SEQ ID NO: 960 - DNA, 500 bp, Homo sapiens
tggaattatggacaatattatcctccccctccaacctgatgggaaaaatgtaaatttcaaatgcagtgtgtgaaaagtatgaaattattattttttttaatgagggatgtaaacagtataagcttgttgtatttgataacctgtcttccttgtttctgtgtaacatgatttgtttagtaatagggggaaaatgtcaattagtagcttaccacagatactgtttcctaccatttataaaatttactttttattgaaaaactattttttgatttttgcattaagtggtctagaattcttttgcaatgcatttgcaacagaattttgtagccttaaggggtaggaagaaaaacctgactgcaaatcatgtcagtgtagtacaaaattctgaaaacacataagggctggttatttacctccttttttttttttttttttaaagaaaaaaggacttttaacctttgctgacaaggttttgtctgtttcagttatacttgtgaatt

SEQ ID NO: 961 - DNA, 500 bp, Homo sapiens
ggaagctgaatgggaaatacagacttgagcgacttgttccaactgcagtgtatcagcacatgaaaatgcataaacgaattcttggacacttgtcatctgtgtactgtgtaacttttgatcgaactggcagacggatatttactggttctgatgactgtcttgtgaaaatatgggcaacagatgatgggaggttgttagctaccttaagaggacatgctgctgaaatatcagacatggctgtaaactatgagaataccatgatagcagctggaagttgtgataaaatgatccgagtctggtgtcttcgaacctgtgcacctttggctgttcttcagggccatagtgcatctattacatcactacagttctcaccattgtgcagtggctcaaagagatatctatcttctactggggcagatggcactatttgtttttggctctgggatgctggaacccttaaaataaacccaagacctgcaaaatttacagagcgccctcgg

SEQ ID NO: 962 - DNA, 500 bp, Homo sapiens
gtcagcaggcggctcaggtgctgatccgcgaggtggccgagaaggagctgctgccccggcgcaccgactggaccgggaaggagcatcccaggacctaccagaatctggtgaagtattacagacacttagcacctgatcacttgctgcaaatatgtcatcgactaggacctcttcttgaacaagaaattcctcaaagtgttcctggagtacaaactttattaggagctggaagacagtctttactacgcacaaataaaagctgcaagcatgttgtgtggaaaggatctgctctggctgcgttgcactgtggaagaccacctgagtcaccagttaactatggtagcccacccagcattgcggatactctgttttcaaggaagctgaatgggaaatacagacttgagcgacttgttccaactgcagtgtatcagcacatgaaaatgcataaacgaattcttggacacttgtcatctgtgtactgtgtaacttttgatcgaact

SEQ ID NO: 963 - DNA, 437 bp, Homo sapiens
ccctagacaagaaagatggaagacgaatgtcttttcagaaacctaaagggactattgagtatactgttgaatcaagggattctttgaatagcatagccctgaagtttgatacaacacctaacgaacttgttcaattaaataagttattctcccgagcagttgttactggacaggttctgtatgttcctgatcctgaatatgtctccagtgttgagagctctccatctctaagccccgtaagtcctctgtcaccaacatcatctgaggctgaatttgataagaccactaatcctgatgtccatccaacagaagcaactccctcatctactttcactggtattcgacctgcacgagttgtatcttcaacttctgaggaggaggaagcatttactgagaaatttcttaaaattaattgcaaatatattaccagtggcaag

SEQ ID NO: 964 - DNA, 132 bp, Homo sapiens
acagaagcaactccctcatctactttcactggtattcgacctgcacgagttgtatcttcaacttctgaggaggaggaagcatttactgagaaatttcttaaaattaattgcaaatatattaccagtggcaag

SEQ ID NO: 965 - DNA, 500 bp, Homo sapiens
ttgaatagcatagccctgaagtttgatacaacacctaacgaacttgttcaattaaataagttattctcccgagcagttgttactggacaggttctgtatgttcctgatcctgaatatgtctccagtgttgagagctctccatctctaagccccgtaagtcctctgtcaccaacatcatctgaggctgaatttgataagaccactaatcctgatgtccatccaacagaagcaactccctcatctactttcactggtattcgacctgcacgagttgtatcttcaacttctgaggaggaggaagcatttactgagaaatttcttaaaattaattgcaaatatattaccagtggcaagggcacagtcagtggtgtgctgctagttacaccaaataatataatgtttgatccacataaaaatgaccctttggttcaagagaatggctgtgaggaatatggcatcatgtgtccaatggaagaggtgatgtcagctgcaatgtacaa

SEQ ID NO: 966 - DNA, 500 bp, Homo sapiens
agccccgcggcagcatggactacctgacgacgttcaccgagaagagtgggcgccttctgcggggcacggccaaccgcctgttggggttcgggggcggcggcgaagcccggcaggtgcgcttcgaagattacctgagggagccagcccagggggacctcgggtgcgggtccccgccccaccggcccccggcgccgtccagcccggagggacctgacactggccaaaagaagaccctagacaagaaagatggaagacgaatgtcttttcagaaacctaaagggactattgagtatactgttgaatcaagggattctttgaatagcatagccctgaagtttgatacaacacctaacgaacttgttcaattaaataagttattctcccgagcagttgttactggacaggttctgtatgttcctgatcctgaatatgtctccagtgttgagagctctccatctctaagccccgtaagtcctctgtcaccaacatcatctgaggct

SEQ ID NO: 967 - DNA, 500 bp, Homo sapiens
cttcttcattcagtggagtccagaaatatatgcagaagatactggcgaatataccagagaacctggatttatagtagtaaaaaagattgaggagtctgaaacaattgaggattctagtaatcaagcagcagccagagaatgggagattactacaagggaagacataaattcaaagcaggttgctacagtgaaagcagacctggagtctgaatcttttcgaccaaacctaagtgatcccagtgaacttttactgccagatcaaattgaaaagcttaccaagcatcttccaccaagaacaattggctatccatggactcttgtttatggtactggaaaacatggcacaagcttgaaaactctttatcgaacaatgacaggtttagacaccccagtgctgatggtgattaaagacagtgatggacaggtttttggtgcgttagcatctgagccactgaaagtgagtgatggcttttatggtactggagagacctttgttttta

SEQ ID NO: 968 - DNA, 36 bp, Homo sapiens
gtcgttctagttcatcagggtccctgaatgctcgaa

SEQ ID NO: 969 - DNA, 184 bp, Homo sapiens
tttacgagaagaatcaggcacactttcttcagaggcatctgattttaacaaagttcatttaagtagacggggtggcatcatggcatctttatatacatcccatccagctgacaatggattaacattggagctctctttggaaatcaaccgaaaattacaggctgttttggaggatacgttacta

SEQ ID NO: 970 - DNA, 63 bp, Homo sapiens
cacgaagaaaattagatcaggttgagagtggaagctatgacaaagaagtcagcagcatgggaa

SEQ ID NO: 971 - DNA, 338 bp, Homo sapiens
tttacgagaagaatcaggcacactttcttcagaggcatctgattttaacaaagttcatttaagtagacggggtggcatcatggcatctttatatacatcccatccagctgacaatggattaacattggagctctctttggaaatcaaccgaaaattacaggctgttttggaggatacgttactaaaaaatattactttgaaggaaaatctacaaacacttggaacagaaatagaacgtcttattaaacaccagcatgaactagaacagaggacaaagaaaacctaaaacaagcctcttgctcagtaaagagacaaaagccacacaggagtaggtgcca

SEQ ID NO: 972 - DNA, 500 bp, Homo sapiens
tcaaatgagcttgatgcaaagcttagagtcacaaaaggagaacttgaaaaacaaatgcaagaaaaatctgaccagctagagatgcatcatgccaaaataaaggaactagaagatctgaagagaacatttaaggagggtatggatgagttaagaacactgagaacaaaggtgaaatgtctagaagatgaacgattaagaacagaagatgaattatcaaaatataaggaaattattaatcgccaaaaagctgaaattcagaatttattggacaaggtgaaaactgcagatcagctacaggagcagcttcaaagaggtaagcaagaaattgaaaatttgaaagaagaagtggaaagtcttaattctttgattaatgacctacaaaaagacatcgaaggcagtaggaaaagagaatctgagctgctgctgtttacagaaaggctcactagtaagaatgcacagcttcagtctgaatccaattctttgcagtcacaatttgataa

SEQ ID NO: 973 - DNA, 154 bp, Homo sapiens
gaggaagaactgcgaaaagaggaagtccaaactctgcaagctgaactcgcttgtagacaaacagaagttaaagcattgagtacccaggtagaagaattaaaagatgagttagtaactcagagacgtaaacatgcctctagtatcaaggatctca

SEQ ID NO: 974 - DNA, 500 bp, Homo sapiens
aggttgagagtggaagctatgacaaagaagtcagcagcatgggaagtcgttctagttcatcagggtccctgaatgctcgaagcagtgcagaagatcgatctccagaaaatactgggtcctcagtagctgtggataactttccacaagtagataaggccatgttgattgagagaatagttaggctgcaaaaagcacatgcccggaaaaatgaaaagatagaatttatggaggaccacatcaaacaactggtggaagaaattaggaaaaaaacaaaaataattcaaagttatattttacgagaagaatcaggcacactttcttcagaggcatctgattttaacaaagttcatttaagtagacggggtggcatcatggcatctttatatacatcccatccagctgacaatggattaacattggagctctctttggaaatcaaccgaaaattacaggctgttttggaggatacgttactaaaaaatattactttgaaggaaaat

SEQ ID NO: 975 - DNA, 45 bp, Homo sapiens
aggttgagagtggaagctatgacaaagaagtcagcagcatgggaa

SEQ ID NO: 976 - DNA, 500 bp, Homo sapiens
gcagtgcagaagatcgatctccagaaaatactgggtcctcagtagctgtggataactttccacaagtagataaggccatgttgattgagagaatagttaggctgcaaaaagcacatgcccggaaaaatgaaaagatagaatttatggaggaccacatcaaacaactggtggaagaaattaggaaaaaaacaaaaataattcaaagttatattttacgagaagaatcaggcacactttcttcagaggcatctgattttaacaaagttcatttaagtagacggggtggcatcatggcatctttatatacatcccatccagctgacaatggattaacattggagctctctttggaaatcaaccgaaaattacaggctgttttggaggatacgttactaaaaaatattactttgaaggaaaatctacaaacacttggaacagaaatagaacgtcttattaaacaccagcatgaactagaacagaggacaaagaaaacctaaaac

SEQ ID NO: 977 - DNA, 500 bp, Homo sapiens
gatccttccactggaatttattactattgtgatgtggaaagtggtcgttatcagtttcattctcgagtagatttgcaaccttatccgacttctagcacaaaacaaagtaaagataaaaaattgaagaagaaaagaaaagatccagattcttctgcaacaaatgaggaaaaggatttgaactcagaggatcaaaaagccttcagtgttgaacatacaagctgcaatgaggaagaaaatttcgcaaatatgaaaaagaaggccaaaataggcattcatcacaaaaatagtccccccaaagtcactgttccaactagtggaaatactatagagtctcctcttcatgaaaacatctctaattcaacatcatttaaagatgagaaaatcatggagactgatagtgaaccagaggaaggtgaaattacagactctcagactgaggatagttatgacgaagccattaccagtgaaggcaatgtaactgcagaagatagtgaggatga

SEQ ID NO: 978 - DNA, 36 bp, Homo sapiens
tcctctggtaatttgcaggttgcatgaagcagcaag

SEQ ID NO: 979 - DNA, 36 bp, Homo sapiens
acctcttcattgcctaaaggtgatcttggaaaaaga

SEQ ID NO: 980 - DNA, 140 bp, Homo sapiens
ggctttccaaaatggtagaggatgcgtgtatgttgctggcagattacaatggcagattggcggcagaaatagatgatagaaagcaactcactcgaatgttagcagattttcttcgttgtcaaaaggaagcccttgcagag

SEQ ID NO: 981 - DNA, 93 bp, Homo sapiens
tttcagcagccatattccaaaaacatacacatccatgggtttgtcagtaataagcgctatagggaatgctggtacatatgcgatggtagaaat

SEQ ID NO: 982 - DNA, 500 bp, Homo sapiens
ggaacgtgaagaattatggaaaaaattagaggagctaaagctaaagaaagctctagaaaaacagaatagtgcttacaacatgcacagtattctcagcaatacaagtgccgaataaaaaaaaagcctcccacctctgccggataggcagagttttgtatgcttttttgaaatatgtaaaaattacaaaacaaacctcatcagtataatataattaaaaggccaattttttctggcaactgtaaatggaaaaatatatggactaaacgtagccctgtgctgtatcatggccatagtatattgtaacctttgtctaatcattggatttattgtgtcacttctgaagtttcacagaaatgaatgaattttatcatctatgatatgagtgagataattatgggagtggtaagaattatgacttgaattcttctttgattgtgttgcacatagatatggtagtctgctctgtatatttttcccttttataatgtgcttttcacact

SEQ ID NO: 983 - DNA, 115 bp, Homo sapiens
tgccttaaggagcccattgcctttcccgctgaagtctagatgttgacatgtaataaagcgggcagcaggatggtggtggatgcggccaactccaatgggcctttccagcccgtgg

SEQ ID NO: 984 - DNA, 36 bp, Homo sapiens
ccttttgactctcctcaggtcatgtttactggtgaa

SEQ ID NO: 985 - DNA, 36 bp, Homo sapiens
tccagctgcaaggaaaagagacgaccaccggataat

SEQ ID NO: 986 - DNA, 409 bp, Homo sapiens
aaacgactacagaaagaactgttggctttgcaaaatgacccacctcctggaatgaccttaaatgagaagagtgttcaaaattcaattacacagtggattgtagacatggaaggtgcaccaggtaccttatatgaaggggaaaaatttcaacttctatttaaatttagtagtcgatatccttttgactctcctcaggtcatgtttactggtgaaaatattcctgttcatcctcatgtttatagcaatggtcatatctgtttatccattctaacagaagactggtccccagcgctctcagtccaatcagtttgtcttagcattattagcatgctttccagctgcaaggaaaagagacgaccaccggataattctttttatgtgcgaacatgtaacaagaatccaaagaaaa

SEQ ID NO: 987 - DNA, 138 bp, Homo sapiens
aatattcctgttcatcctcatgtttatagcaatggtcatatctgtttatccattctaacagaagactggtccccagcgctctcagtccaatcagtttgtcttagcattattagcatgctttccagctgcaaggaaaag

SEQ ID NO: 988 - DNA, 138 bp, Homo sapiens
gtcatgtttactggtgaaaatattcctgttcatcctcatgtttatagcaatggtcatatctgtttatccattctaacagaagactggtccccagcgctctcagtccaatcagtttgtcttagcattattagcatgctt

SEQ ID NO: 989 - DNA, 214 bp, Homo sapiens
gtcatgtttactggtgaaaatattcctgttcatcctcatgtttatagcaatggtcatatctgtttatccattctaacagaagactggtccccagcgctctcagtccaatcagtttgtcttagcattattagcatgctttccagctgcaaggaaaagagacgaccaccggataattctttttatgtgcgaacatgtaacaagaatccaaagaaaa

SEQ ID NO: 990 - DNA, 500 bp, Homo sapiens
aggtgcaccaggtaccttatatgaaggggaaaaatttcaacttctatttaaatttagtagtcgatatccttttgactctcctcaggtcatgtttactggtgaaaatattcctgttcatcctcatgtttatagcaatggtcatatctgtttatccattctaacagaagactggtccccagcgctctcagtccaatcagtttgtcttagcattattagcatgctttccagctgcaaggaaaagagacgaccaccggataattctttttatgtgcgaacatgtaacaagaatccaaagaaaacaaaatggtggtatcatgatgatacttgttgatgccactgttatcatcctcctagcagaagatagtcctactgagaaaatgagcactttgatcattcagtctttgaactttaacctttgactggaagtgacctataggcaatgaagactacttccttttactgcatttttactcgtgtgcattctgggcgcatgttgatcg

SEQ ID NO: 991 - DNA, 278 bp, Homo sapiens
agctcctccccctgcgtctctggcctcgccggtcttggggggatggttccatcatggcgtcaatgcagaccacaggaaggagggtggaagtatggtttccaaaacgactacagaaagaactgttggctttgcaaaatgacccacctcctggaatgaccttaaatgagaagagtgttcaaaattcaattacacagtggattgtagacatggaaggtgcaccaggtaccttatatgaaggggaaaaatttcaacttctatttaaatttagtagtcgatat

SEQ ID NO: 992 - DNA, 40 bp, Homo sapiens
tctttttatgtgcgaacatgtaacaagaatccaaagaaaa

SEQ ID NO: 993 - DNA, 36 bp, Homo sapiens
aatccaagaatccactgagttcctccccgggcagaa

SEQ ID NO: 994 - DNA, 500 bp, Homo sapiens
tatgtgcacctgcaacaggtgtacattttgcatctgtcagaacttcctcaactcagacttgctgcaatctgtaaagaacaaaatcttcactgcagttcttaacaggcacgtgacacaagctgacctcaagagctccacgttttggcttcgagcaagttttggtgctactgtttttgcagttttgggctttgctatgtacaaagcattattgaaacagcgatgatataaaaagaaatactgtccctaccaaaaacaaatacttttatgtacattctgaatgctttaagttctgctagaattattgagatatttatacatgcagagttactttattaatatttgtaattcatgcataagagtattttaatgatagttataactgcagtattggctagcatatggaaagaaaacagctaacagccaaactaaaatggctaaattccagaggccaaaagggaatattttgtaaatatatgtacatattcaggcaagatatggtc

SEQ ID NO: 995 - DNA, 94 bp, Homo sapiens
gatctgcccaccaggcatgagccattcagcttgttcagtaaacaagagtgttctagaagccatcagaggaagacttggatcttttcatgaactc

SEQ ID NO: 996 - DNA, 500 bp, Homo sapiens
caaagaagcctgtccagtttggaactgttcctctcctgtgcacagaaacagttaagtgctttaatagctacggaaccagttgacattgaataaaaagaacatgacaaacccacactggcattggataaatcatattacaccttcaaaatacacactctgaattataaagatgtgtttgttttctttccaaatcatgtagaattgatttccagttcaaggataaaccaaaacaatatttagaactatcaagtgatctaatttattttcttttggtttcttctttacatttactgttattttattattattagtagtagcagcaacagagtatgatatgacccaaaagccattgtaaagtgccacattaccaaaattaattaagtaaactttatagcctgtgggagtctattatatattattttgcaaaagtagtaaatatattattgtttcatgatgactcttgatgagatgctagaatgtaaccatacatttatcttatt

SEQ ID NO: 997 - DNA, 482 bp, Homo sapiens
agaacaatgttatgaatatcaggcaattcaactgttctcctcatccatactggcttccaaatttcatggatgtttttacttggtcccttccatttgttggggaaaaagtgactgagatgctggtaaatgtcctcaacatctgctcagatgatgaactagggtcagaagaagatggatttgatggtgcaacagctgcagcccggaaagaggtgataaggaacaagatccgagcaataggcaaaatggccagagtgttctcagtgctcagagaagagagtgagagtgtgctgacgctgaaaggcttgaccccaactggcatgctccccagcggagtactttctggagggaagcaaaccctgcaaagcgaggctgatgagctatcaaaggattttcaccacaacataagatcactagcttcgaggaagccaagggcttagaccgaattaatgagaggatgccgcctcgcagagatgccatgccct

SEQ ID NO: 998 - DNA, 514 bp, Homo sapiens
gaagaaattaccaaacattaaaatgagaaaaatttgcgctaatgatgcaattcccaagacgtgcaagaggaaaactactataactgtagaccaagatttgggggaattggaactaaacgatgaatcaagtgattcagatgaggaaatgactgcagtggcctaattgtcttcacttgaattgaaaataaataatttgagagcttcaaattatattcattgattatggtacctaattgtcaagatacaaaaatttgatactgacattctcttatatgatgagagtttcatttgcgtttcaaaaatggtgttatgatacttattttaaaatgaagattgcttttcatttccattaagttgctaaaatagatagatgtgatctgcagaagttgtttagtcttcatctgaatttcaggctgggagggagcaatataactaaggacaaaaaatgttttgtttttcttgtgtatttatgatcacctaatttcacgttttgtgaaatggacagtaacctgtt

SEQ ID NO: 999 - DNA, 500 bp, Homo sapiens
agtgaagatgatgatgatattctgccaaatatggacaaaaatccaacaactccatcatcagttatctttccattggtaaaaactcctcaatgtcagcatgtcagtcctggcatgctaggttctataaataggaatgactgtgataaatatgtttttcgtatgcaaaaatatcataaaagtaatggtggtattgtctggggcaacatcaagaaaaaattagttgaaactgatttctcaactccaacaccaagaaggaaaaccccatttaacacagacttaggagaaaactctggtattggaaaacttttcactaatgctgtggaatctttagatgaagaagagaaagattattatttttcgaactctgattctgcatagtaaaatgagaaaatatgattcctgggatttttaccataaagcagacagtgtttgtattttcaactggagtacatgtattttctttgtaaagtagcttcctatgaaaatgtggacttttttga

SEQ ID NO: 1000 - DNA, 46 bp, Homo sapiens
aggagatcatcaggaataagatcagagccattgggaagatggcacg

SEQ ID NO: 1001 - DNA, 98 bp, Homo sapiens
gtgcagcaatatcatccttccaacaatggagaatatcaaagttcaggaccagaagatgacttcgaatcttgtttgagaaatatgaagtcacagtatga

SEQ ID NO: 1002 - DNA, 86 bp, Homo sapiens
ctgcagactgagcggtggaccgaattgggaccgctggcttataagcgatcatgtttctccagtattacctcaacgagcagggagat

SEQ ID NO: 1003 - DNA, 26 bp, Homo sapiens
agctttagaactagctttggatcgtg

SEQ ID NO: 1004 - DNA, 321 bp, Homo sapiens
gagccgccgacggggcgggtgggctttgctgccgagcaggcggcgccgtcttggggcctagcggcgaggcgacccgcacagtactgtaagattgatgttaaaggcatggtgttcaccccacttcatcagcgtacataagttatctcttcttttggacccttattttatgccataatgcaacaagctttagaactagctttggatcgtgcagagtatgtcattgaaagtgcccgacagagacctcctaaaaggaaatacctatcaagtggaagaaaatctgtatttcaaaaactttatgacttgtatattgaagaatgtgaa

SEQ ID NO: 1005 - DNA, 295 bp, Homo sapiens
aaaggcatggtgttcaccccacttcatcagcgtacataagttatctcttcttttggacccttattttatgccataatgcaacaagctttagaactagctttggatcgtgcagagtatgtcattgaaagtgcccgacagagacctcctaaaaggaaatacctatcaagtggaagaaaatctgtatttcaaaaactttatgacttgtatattgaagaatgtgaaaaagaacctgaagttaagaaattaagaagaaatgtgaacttgttagagaagcttgttatgcaagagactttgt

SEQ ID NO: 1006 - DNA, 500 bp, Homo sapiens
ctcctgtagacccagtggaacccataagtaattcagaaccatcaatgaattcagatatgggaaaagtcagtaaaaatgatactgaagaggaaagtaataatccgccacaacagacaatgaaataagtaggactgagtatttatgtgaaaactctctagaaggtaaaaataaagataattcttcaaatgaagtcttcccccaaggagcagaagaaagaatgtgttaccaatgtgagagtgaagatgaaccacaagcagatggaagtggtctgaccactgcccctccaactcccagggactcattacagccctccattaagcagaggctggcacggctacagctgtcaccagattttaccttcactgctggccttgctgcagaagtggctgctagatctctctcctttaccaccatgcaggaacagacttttggtgatgaggaggaagaacaaataatagaagaaaataaaaatgagatagaagaaaagtaagaaccaagat

SEQ ID NO: 1007 - DNA, 500 bp, Homo sapiens
agactccatcaactgaaacttttaggtcatactttagtcgttgaatttgcaaaagagcaagatcgagttcactccccatgtcccacttcaggctctgaaaaaaaaaaaaggtctgatgaccctgtcgaagatgataaagaaaaaaaagaacttggttatttaacagtagaaaatggaattgcaccaaaccatgggctgacttttcctttaaattcatgcctcaagtatatgtacccaccaccttccagcacaatcctagcaaacattgtaaatgccttggcaagcgtgcctaagttctatgtacaggtccttcatcttatgaataaaatgaatttgcccacaccttttggaccaattactgcgcgacctcccatgtatgaagactatatgccattgcatgcacctcttccacccacatctcctcagccacctgaggaacctcctttgccagacgaggatgaggaattatctagtgaagaatcagaatatgaaagcactga

SEQ ID NO: 1008 - DNA, 36 bp, Homo sapiens
agatggtcctgtgaaaagtgtttctcgggaaactct

SEQ ID NO: 1009 - DNA, 90 bp, Homo sapiens
gctattcagttgtgccttgaatgtcaaaaagctgccagcacttttaaacattacagttgtataagtgaactgaattcaaagctgcaagat

SEQ ID NO: 1010 - DNA, 25 bp, Homo sapiens
tgatgagcagatagatcactacaag

SEQ ID NO: 1011 - DNA, 59 bp, Homo sapiens
aatttgacttggccttaagaggaaagaagaaaaggaagaagtttatgaaggatgccaaa

SEQ ID NO: 1012 - DNA, 36 bp, Homo sapiens
cagcagcccccagcacggtccagtttgtatcggagg

SEQ ID NO: 1013 - DNA, 397 bp, Homo sapiens
tatattacaagttggcagtggagcagctgcagagccatcccgaggcacaggaagctctgggccctcctctcaacatccattatctcaagctcatcgacagggaaaacttcgtggacattgttgatgccaagttgaagattcctgtctctggatccaaatcagagggccttctctacgtccactcatccagaggtggcccctttcagaggtggcaccttgacgaggtctttttagagctcaaggatggtcagcagattcctgtgttcaagctcagtggggaaaacggtgatgaagtgaaaaaggagtagagacgacccagaagacccagcttgcttctagtccatccttccctcatctctaccatatggccactggggtggtggcccatctcagtgac

SEQ ID NO: 1014 - DNA, 292 bp, Homo sapiens
ggatccaaatcagagggccttctctacgtccactcatccagaggtggcccctttcagaggtggcaccttgacgaggtctttttagagctcaaggatggtcagcagattcctgtgttcaagctcagtggggaaaacggtgatgaagtgaaaaaggagtagagacgacccagaagacccagcttgcttctagtccatccttccctcatctctaccatatggccactggggtggtggcccatctcagtgacagacactcctgcaacccagttttccagccaccagtgggatgatg

SEQ ID NO: 1015 - DNA, 361 bp, Homo sapiens
gacaacttgcctttgatgattttcaagagagttgtgctatgatgtggcaaaagtatgcaggaagcaggcggtcaatgcctctgggagtaaggatccttttccacggtgtgttctatgccgggggctttgccattgtgtattacctcattcaaaagtttcattccagggctttatattacaagttggcagtggagcagctgcagagccatcccgaggcacaggaagctctgggccctcctctcaacatccattatctcaagctcatcgacagggaaaacttcgtggacattgttgatgccaagttgaagattcctgtctctggatccaaatcagagggccttctctacgtccactcatccag

SEQ ID NO: 1016 - DNA, 82 bp, Homo sapiens
ctttttagagctcaaggatggtcagcagattcctgtgttcaagctcagtggggaaaacggtgatgaagtgaaaaaggagtag

SEQ ID NO: 1017 - DNA, 361 bp, Homo sapiens
attttcaagagagttgtgctatgatgtggcaaaagtatgcaggaagcaggcggtcaatgcctctgggagtaaggatccttttccacggtgtgttctatgccgggggctttgccattgtgtattacctcattcaaaagtttcattccagggctttatattacaagttggcagtggagcagctgcagagccatcccgaggcacaggaagctctgggccctcctctcaacatccattatctcaagctcatcgacagggaaaacttcgtggacattgttgatgccaagttgaagattcctgtctctggatccaaatcagagggccttctctacgtccactcatccagaggtggcccctttcagag

SEQ ID NO: 1018 - DNA, 435 bp, Homo sapiens
gcgaccttaattatgagatgagctaatgctttactgacttaaccatggcgcagcgggcagtgtggctcataagccacgaaccgggaactccactttgtggcaccgtgagattctccagacggtatccaactgttgaaaaacgagccagagtcttcaatggagcaagttatgtgcctgttcctgaagatggtccctttcttaaagcactgctctttgaacttagattattggatgatgataaagacttcgttgagagtcgtgatagctgttcacgcatcaataaaacatccatttatggactcctgataggaggtgaagaactctggccagttgttgcttttctgaagaatgacatgatatatgcttgtgttccactagttgaacaaactctgtcccctcgtccgccactaattagtgtcagtggagtttcacaag

SEQ ID NO: 1019 - DNA, 102 bp, Homo sapiens
ttcaaatgtccaagactgacagctgacttctcagcaggagcaatggaaccagaagacaacaaagtgacatttcaattgctggaagaaaacagcaccaaccta

SEQ ID NO: 1020 - DNA, 95 bp, Homo sapiens
tgcaggttaaggtggtcaaagtcaagaaatccgataagggagatttctacaaaaggcagattgcatgggcccttcgagatcttgctgtggtagat

SEQ ID NO: 1021 - DNA, 36 bp, Homo sapiens
aagtagaactgacaggcggtaagcatttgcctggag

SEQ ID NO: 1022 - DNA, 83 bp, Homo sapiens
tgcgtctggtgaccctgcttggcaatgcattggagcccaacacaagtggatccttcagctcatgcacagttgcaaagagggct

SEQ ID NO: 1023 - DNA, 500 bp, Homo sapiens
caaacctgaaagacgattacagcactgcacagagagtaacatacaaatactacgttggacgcaaggctatgtttgacagcgattttaagcaagctgaggagtacctgtcatttgcctttgagcattgtcaccgttctagtcagaagaacaaaaggatgattctgatctatttgcttccagtaaaaatgctattgggtcacatgcccactgtggagctcctgaaaaagtatcacctgatgcagtttgcggaagtaaccagagctgtgagcgagggcaacctgctgctgctgcacgaggcgctggcgaagcacgaggccttcttcattcgctgcggaatcttcctcaccctggagaagctgaagatcatcacctacaggaacctctttaagaaagtgtatttgttactgaaaacacaccagctgtctctggatgcttttctggttgccttgaagttcatgcaggtggaggacgtggacattgacgaagttcagtgtattctg

SEQ ID NO: 1024 - DNA, 36 bp, Homo sapiens
agaaagaatgtctttcagatcacaacagtatcagga

SEQ ID NO: 1025 - DNA, 31 bp, Homo sapiens
gtgcttccgatacaagcgacaaaaatcgagt

SEQ ID NO: 1026 - DNA, 500 bp, Homo sapiens
tacttcctggattgttctttctagtcgaagaattgaattttacaaagaatccaagcaacaggctctgtccaatatgaaaactgggcacaaaccagaaagtgtggatttgtgtggagcacacattgaatgggccaaggaaaaatcgagcagaaagaatgtctttcagatcacaacagtatcaggaaatgagttccttctacagtcagatattgacttcatcatattggattggttccacgctatcaaaaatgcaattgacagattgccaaaggattcaagttgtccatcaagaaacctggaattattcaaaatccaaagatcctctagcactgaattgctaagtcactatgacagtgatataaaagaacagaaaccagagcacagaaaatctttaatgttcagactgcatcacagtgcttccgatacaagcgacaaaaatcgagttaaaagcagattaaagaagtttattacccgaagaccttccctgaaaactctgcaag

SEQ ID NO: 1027 - DNA, 500 bp, Homo sapiens
attaagaagatgctatgctcaaaagatagcctgggactaaaagaggaactgacagatgaagacagagaaaaggttgcagtgcacgaggggattaactcaggaacagccatgtcaagaggattgtatcaaccagcaacaatctttatgggccgccaaatgtcagccatcttaagcatgagagatttcagtacagagcacaaatctccccagcccacaaagaacttttcaattcctgacccacattcacaccgacagacagcccagagcagtaatgtgacagacagctgtgtagtacaaactagtaatgacacacagtgcttaaataagtctgacaacatagatggaaaggcatctcttcagattggtgagaaaatgccagtcacagccagtgtattgtctgaggaggaacaaactcattgcttggagataggaagtaacacacgtcatggcaagagtaatttatctgaaggcaaaaagtctgctgaactcaattccccgtt

SEQ ID NO: 1028 - DNA, 132 bp, Homo sapiens
gatgttgaaacgggtacaagcataacagtacctcagaaaaagtggttgcattttatttcacccatttttgttcaagctcttacattaacattcttagcagaatggggtgatcgctctcaactaactacaatt

SEQ ID NO: 1029 - DNA, 147 bp, Homo sapiens
ttaaatggaccgggagatgttgaaacgggtacaagcataacagtacctcagaaaaagtggttgcattttatttcacccatttttgttcaagctcttacattaacattcttagcagaatggggtgatcgctctcaactaactacaatt

SEQ ID NO: 1030 - DNA, 82 bp, Homo sapiens
acagctcagcaactgctccaggacagcaagacaaaaatagaagtcatacgaatgcagattcttcaggcagtccagactaatg

SEQ ID NO: 1031 - DNA, 36 bp, Homo sapiens
actgaggaagcgcccaaggttttcaagatggcagca

SEQ ID NO: 1032 - DNA, 86 bp, Homo sapiens
tctatgcatggtcagcccagtccttctctagaagatgcaaaactcagaagaccaatggtcatagaaatcatagaaaaaaattttga

SEQ ID NO: 1033 - DNA, 500 bp, Homo sapiens
aagaaagcagatgatgttgcagccattgaatgccagtctgaagaagtcatccgtcttcattcacagggagaaaacaatcctttgtctaagaagctgtctccagtacactcagaaatggcagattatattaatgcaacgccatctactcttcttggtagccgggatcctgatttaaaggacagagcattacttaatggaggaactagtgtaacagaaaagttggcacagctgattgctacctgtcctccttccaagtcttccaagacaaaaccgaagaagttaggaactggcactacagcaggattggttagcaaggatttgatcaggaaagcaggtgttggctctgtagctggaataatacataaggacttaataaaaaagccaaccatcagcacagcagttggattggtaactaaagatcctgggaaaaagccagtgtttaatgcagcagtaggattggtcaataaggactctgtgaaaaaactgggaactggcactac

SEQ ID NO: 1034 - DNA, 207 bp, Homo sapiens
gaaacattgaattgaatcaacagacttgtcttcttactctgcgagattataataatcgagagaaatcagaagtatctacagatttgattcaggcaaatcctaaacaaggcgcgttagcgaaaaagtcatctcaaacgaaaaagaagaagaaggctttcaactccccgaaaacagggcagaataaaacagtgcaatatcccagtgaca

SEQ ID NO: 1035 - DNA, 340 bp, Homo sapiens
tcatcaggctgctgactatctcaaagtggaagaggtggtcactaaatgcaaaataaagatggaagattttgcttttattgctaatccttcttctacagagatatctagtattactggaaacattgaattgaatcaacagacttgtcttcttactctgcgagattataataatcgagagaaatcagaagtatctacagatttgattcaggcaaatcctaaacaaggcgcgttagcgaaaaagtcatctcaaacgaaaaagaagaagaaggctttcaactccccgaaaacagggcagaataaaacagtgcaatatcccagtgacatcttagagaatgcatct

SEQ ID NO: 1036 - DNA, 124 bp, Homo sapiens
ctgagctatacccccttggcagaagtaggcctgaatgctctagaagaatggtcaatttatattgacagacatgtaatgcagccttattacaaagacattctcccctgcctggatggatacctga

SEQ ID NO: 1037 - DNA, 500 bp, Homo sapiens
tgtatggcttttagtatgtttatcaagtggctaacaaatgcattctgaaaatgtatttaacatagctgttttaacaaatgaaaaaaagacgtagaaaaatgtttagatgtctttttgtgatgttatataaaattgtagatgactgtggtaaatgtgtaattatgtccattatgcttcaaagttgagttttcatctttgactccaaaatgtcagagggaggccgctctaaactaaaaataacgaaaggttgccaagtattaatactagttacctccctcttttcgtagtttttgtcatgtctgtcaacttactcgattgtgtggttgcattcagaatatttgaagtttcttacgtagacagaaataataaaaatattaactaggaaaaaacagtatagcaccaagccagtatttggtatctctctctagagcgagcaagagagggagagaggaggaaaaaatacacataatacaaacatacatgcatgcacacatacatac

SEQ ID NO: 1038 - DNA, 95 bp, Homo sapiens
ttaaaattgctcctgcttgtgccattatgatcagtacatatgaatttggaaaggcttttttccagaaacaaaatgttcgaaggcagcaatactag

SEQ ID NO: 1039 - DNA, 323 bp, Homo sapiens
tgtcaacctggattataatgaagaacattgttgctaaaaatggattttccggattattttcaggcctaattcctcgcttaattaaaattgctcctgcttgtgccattatgatcagtacatatgaatttggaaaggcttttttccagaaacaaaatgttcgaaggcagcaatactagtgatgctgtttcaacttgaaacaacaactatagccaaagaagatggagactcttaggcaagaatgtttttcaccattattctctcacaatgattttatgtctttctttcctataatttaaataaataatttcagctctacctctaaa

SEQ ID NO: 1040 - DNA, 67 bp, Homo sapiens
ctgctcaggaacacaatgaaaatgatcagcagattcgagaaggtctagagaaagcacaaagattatt

SEQ ID NO: 1041 - DNA, 500 bp, Homo sapiens
acactgaaacagaaaaaaattgatgaaacttctgagcaggaacaaaaacataaagaaaccaacaatagcaatgctcagaaccccagcgaagaagagggtgaagggcaagatgaggacattttacctctaacccttgaagagaaggaaaacaaagaatacctaaaatctctatttgaaatcttgattctgatgggaaagcaaaacatacctctggatggacatgaggctgatgaaatcccagaaggtctctttactccagataactttcaggcactgctggagtgtcggataaattctggtgaagaggttctgagaaagcggtttgagacaacagcagttaacacgttgttttgttcaaaaacacagcagaggcagatgctagagatctgtgagagctgtattcgagaagaaactctcagggaagtgagagactcacacttcttttccattatcactgacgatgtagtggacatagcaggggaagagcacctacctgtgtt

SEQ ID NO: 1042 - DNA, 45 bp, Homo sapiens
ggattacctggcagtggaaagacacatgttgcaaaacttattcga

SEQ ID NO: 1043 - DNA, 500 bp, Homo sapiens
caaaaaagaccattcctcatccagaagagggggttttgataggccatcctatgaccggaagtctgaccgaccagtctatgaaggaccatccatgtttggaggagaacgaaggacttatcctgaggagcgaatgcctctgccagctccttcactgagccaccagcctcctccagctccacgagtcgagaagaagcctgaatcaaagaatgtggacgatattttgaaaccaccgggccgggagagcagacctgagagaattgttgttataatgagaggattacctggcagtggaaagacacatgttgcaaaacttattcgagataaggaggtagaatttggaggacctgcacccagagttctaagcctggatgattacttcatcactgaagtggaaaaagaagaaaaagatccagattctggaaagaaagtgaaaaagaaggtaatggaatatgaatatgaagctgagatggaggagacttaccgcaccagcatgttcaaaa

SEQ ID NO: 1044 - DNA, 500 bp, Homo sapiens
gtgatcgttatgatagagaaagagatcgtgagccttattttgatcgtcaaagtaatgtcatagcagatcatcgagattttaaaagggatcgtgagacacatagagatcgagaccgggatcgtggtgttattgactatgaccgggatcgatttgacagagaacgccgaccccgagatgatagagctcagtcatatcgagacaaaaaagaccattcctcatccagaagagggggttttgataggccatcctatgaccggaagtctgaccgaccagtctatgaaggaccatccatgtttggaggagaacgaaggacttatcctgaggagcgaatgcctctgccagctccttcactgagccaccagcctcctccagctccacgagtcgagaagaagcctgaatcaaagaatgtggacgatattttgaaaccaccgggccgggagagcagacctgagagaattgttgttataatgagaggattacctggcagtggaaagacacat

SEQ ID NO: 1045 - DNA, 500 bp, Homo sapiens
ggctgcagacccttctgttgtgaatcttggccaaggctttccagatatatcccctcctacatatgtaaaagaagaattatcaaagattgcagcaatcgatagcctgaatcagtatacacgaggctttggccatccatcacttgtgaaagctctgtcctatctgtatgaaaagctttatcaaaagcaaattgattcaaataaagaaatccttgtgacagtaggagcatatggatctctttttaacaccattcaagcattaattgatgagggagatgaagtcatactaatagtgcctttctatgactgctatgagcccatggtgagaatggctggagcaacacctgtttttattcccctgagatctaaacctgtttatggaaaaagatggtctagttctgactggacattagatcctcaagaactggaaagtaaatttaattccaaaaccaaagctattatactaaatactccacataacccacttggcaaggtgtataaca

SEQ ID NO: 1046 - DNA, 84 bp, Homo sapiens
gaaaacttgtattcttaggtttggataatgcaggcaaaaccactcttcttcacatgctcaaagatgacagattgggccaacatg

SEQ ID NO: 1047 - DNA, 109 bp, Homo sapiens
aatataagtggaggcgtcgcgctggcgggcattcctgaagctgacagcattcgggccgagatgtctcgctccgtggccttagctgtgctcgcgctactctctctttctg

SEQ ID NO: 1048 - DNA, 36 bp, Homo sapiens
ttcgctgactacattcagcccgtctggtaaacttgt

SEQ ID NO: 1049 - DNA, 59 bp, Homo sapiens
cccgtctggtaaacttgtccagattgaatatgctttggctgctgtagctggaggagccc

SEQ ID NO: 1050 - DNA, 92 bp, Homo sapiens
cagggattgtgtttaaagtagtgcttctaccaacatgtcccgtggttccagcgccggttttgaccgccacattaccattttttcacccgagg

SEQ ID NO: 1051 - DNA, 159 bp, Homo sapiens
ttaaccagggtggccttacatcagtagctgtcagagggaaagactgtgcagtaattgtcacacagaagaaagtacctgacaaattattggattccagcacagtgactcacttattcaagataactgaaaacattggttgtgtgatgaccggaatgacag

SEQ ID NO: 1052 - DNA, 500 bp, Homo sapiens
attgtgcagaatctggaagtttggacatcatgaagatgcttcttatgtattgtgccaagatggaaaaggatggttatggaatgactccccttctctcagcaagtgtgactggtcacacaaatattgtggattttctgacacaccatgcacagaccagcaagacagaacgtattaatgctctagagcttctgggagctacatttgtagacaaaaaaagagatctgcttggggctttgaaatactggaaaaaggcaatgaacatgaggtacagtgataggactaatattattagtaaaccagtgccacagacactaataatggcttatgattatgccaaggaagtgaacagtgcagaagagctagaaggtcttattgctgatcctgatgagatgagaatgcaggcactattaatcagagaacgtattcttggtccttctcatcctgatacctcttactatattagatatagaggcgctgtctatgcagactctggaaatttc

SEQ ID NO: 1053 - DNA, 36 bp, Homo sapiens
atagttcttggagcagatacaagagcaactgaaggg

SEQ ID NO: 1054 - DNA, 36 bp, Homo sapiens
agtgacgcccagcacatggttggtgcttgtaaatac

SEQ ID NO: 1055 - DNA, 36 bp, Homo sapiens
tttgttttaattgtttagatgtgcctggcatcagaa

SEQ ID NO: 1056 - DNA, 61 bp, Homo sapiens
gaacctcctgtaccaactagagtggggaaaaagaagaagaaaacaaagggaccagatgctg

SEQ ID NO: 1057 - DNA, 159 bp, Homo sapiens
ctttccagagtgttgaatcttccaccagaaaacttgatcacatcaatatctgcagttccaatttcccaaaaagaagaagtagctgattttcagctttctgtggattctttattggaaaaagacaatgaccattcaagaccagatattcaagttcaagcc

SEQ ID NO: 1058 - DNA, 67 bp, Homo sapiens
gctttctgtggattctttattggaaaaagacaatgaccattcaagaccagatattcaagttcaagcc

SEQ ID NO: 1059 - DNA, 33 bp, Homo sapiens
acaagcgttataggaagattgttgatgtcaatt

SEQ ID NO: 1060 - DNA, 200 bp, Homo sapiens
ctgcaggagctgggagggagacgtggaagtgctcatcagagctccccagggcctgccccacagtgaggcctcagcactgcagcttgattttcacctttaccatctcttttaatctgttgagcttctggagacatttctctgccaaaccaagactggaaaccattgagctcacctgtgcactttgcaaacttcgaagtgca

SEQ ID NO: 1061 - DNA, 179 bp, Homo sapiens
aaaaacctgtgaaaactaagactgtttcttccagtaatggaggggaaagttccagtcgcagcgctgagaagcgatcagctgaagaagaagctgccgacctcccaacaaagcctacaaagatctccaagtttggatttgccataggtagtcagacgacaaagaaagcatcagccatatcc

SEQ ID NO: 1062 - DNA, 36 bp, Homo sapiens
ctacaaagatctccaagtttggatttgccataggta

SEQ ID NO: 1063 - DNA, 267 bp, Homo sapiens
gaggccgcggcggggaaaatggcggacgggaaggcgggagacgagaagcctgaaaagtcgcagcgagctggagccgccggaggacctgaagaagaagcagaaaaacctgtgaaaactaagactgtttcttccagtaatggaggggaaagttccagtcgcagcgctgagaagcgatcagctgaagaagaagctgccgacctcccaacaaagcctacaaagatctccaagtttggatttgccataggtagtcagacgacaaagaaagca

SEQ ID NO: 1064 - DNA, 26 bp, Homo sapiens
cctccagaagcaaagatgaggatgaa

SEQ ID NO: 1065 - DNA, 308 bp, Homo sapiens
aacagacaaggcctacagacttatttcttcttggacacacccacggtgcggccacggcggccagtggtcttggtgtgctggcctcggacacgaaggccccagaagtgacgcagccctctatgggcccgaatcttcttcagtcgctccaggtcttcacggagcttgttgtccagaccattggctaggacctggctatattttccatcctttacatccttctgtctgttcaagaaccagtctgggatcttgtactggcgtggattctgcataacggtgatcacacgttccacctcatcatcagtgagttc

SEQ ID NO: 1066 - DNA, 36 bp, Homo sapiens
cactttgatggcttgtaggtttgatggatgagttta

SEQ ID NO: 1067 - DNA, 500 bp, Homo sapiens
ggttataccttggcacctaaataaaagatacaataggaaacgattctttgccttgccttatgtggaccattttctcagactggaacgtgagaaacgagcccgcatcaaagcacggaaggaaaatttagagagaaagaaagcaaaaattcttttaaaaaagtttccacatcttgctgaagcccaaaagtcaagtcttgtctaagatgtctgaactattaaatttaccattttgtttttcttgaatagtctgtgtacaggagtaaatatgttaagtggtttataaagaaattctgtttttagtcaagtgactttactaatcagttgttctaagtgtgaatatggcatgctaattagctaatttggtagaagctaatttgcttctaaaaatcaggtataaagttcagatgagattcccactttataaattctgacatttaagcaggctttaaatgtcacctgctaccttagagtgtgaaggtgatggtaactgccacagcaaa

SEQ ID NO: 1068 - DNA, 500 bp, Homo sapiens
tagatagagatttaacagagttttcagaattagaatactcagaaatgggatcatcgttcagtgtctctccaaaagcagaatctgccgtaatagtagcaaatcctagggaagaaataatcgtgaaaaataaagatgaagaagagaagttagttagtaataacatccttcataatcaacaagagttacctacagctcttactaaattggttaaagaggatgaagttgtgtcttcagaaaaagcaaaagacagttttaatgaaaagagagttgcagtggaagctcctatgagggaggaatatgcagacttcaaaccatttgagcgagtatgggaagtgaaagatagtaaggaagatagtgatatgttggctgctggaggtaaaatcgagagcaacttggaaagtaaagtggataaaaaatgttttgcagatagccttgagcaaactaatcacgaaaaagatagtgagagtagtaatgatgatacttctttccccagtacgcca

SEQ ID NO: 1069 - DNA, 36 bp, Homo sapiens
ttgtgcactcacttccaggtaggttattgtcattgc

SEQ ID NO: 1070 - DNA, 36 bp, Homo sapiens
ttttggacttgtgctcaggtaatttgtgtccgttat

SEQ ID NO: 1071 - DNA, 36 bp, Homo sapiens
ggtcaagaaggcatgcaggctgtgatggccagtgac

SEQ ID NO: 1072 - DNA, 36 bp, Homo sapiens
ctcaacaggacggagcaggtgagtctggcttcctgg

SEQ ID NO: 1073 - DNA, 76 bp, Homo sapiens
gaactgagtaatagtcaacttctggcagactttctttcccctaatggtggggaaacacaatttcttgataagatac

SEQ ID NO: 1074 - DNA, 374 bp, Homo sapiens
atcagagacattgagaggcaaattcggaaaaaagaaaacattcgtcttttgggagaacagattattttgactgagcaacttgaagcagaaagagagaagatgttattggcaaaaggatctcaaaaatcatgacttgaatgtgaaatatctgttggacagacaacacgagtttgtgtgtgtgtgttgatggagagtagcttagtagtatcttcatctttttttttggtcactgtccttttaaacttgatcaaataaaggacagtgggtcatataagttactgctttcagggtcccttatatctgaataaaggagtgtgggcagacactttttggaagagtctgtctgggtgatcctggtagaagccccattaggg

SEQ ID NO: 1075 - DNA, 36 bp, Homo sapiens
caagtcatcaccagaaaggcaactcaaagttatgtt

SEQ ID NO: 1076 - DNA, 434 bp, Homo sapiens
gcggccgaggagggaagacggcagtttggcgacatttctcggccgaagggccatttgcttttgcggagatgcggcattccaaaagaactcactgtcctgattgggatagcagagaaagctggggacatgaaagctatcgtggaagtcacaagcggaagaggagatctcatagtagcacacaagagaacaggcattgtaaaccacatcaccagtttaaagaatctgattgtcattatttagaagcaaggtccttgaatgagcgagattatcgggaccggagatacgttgacgaatacaggaatgactactgtgaaggatatgttcctagacattatcacagagacattgaaagcgggtatcgaatccactgcagtaaatcttcagtccgcagcaggagaagcagtcctaaaaggaagcgcaatagacactgttca

SEQ ID NO: 1077 - DNA, 254 bp, Homo sapiens
tcattatttagaagcaaggtccttgaatgagcgagattatcgggaccggagatacgttgacgaatacaggaatgactactgtgaaggatatgttcctagacattatcacagagacattgaaagcgggtatcgaatccactgcagtaaatcttcagtccgcagcaggagaagcagtcctaaaaggaagcgcaatagacactgttcaagtcatcagtcacgttcgaagagccaccgaaggaaaagatccaggagta

SEQ ID NO: 1078 - DNA, 366 bp, Homo sapiens
actcactgtcctgattgggatagcagagaaagctggggacatgaaagctatcgtggaagtcacaagcggaagaggagatctcatagtagcacacaagagaacaggcattgtaaaccacatcaccagtttaaagaatctgattgtcattatttagaagcaaggtccttgaatgagcgagattatcgggaccggagatacgttgacgaatacaggaatgactactgtgaaggatatgttcctagacattatcacagagacattgaaagcgggtatcgaatccactgcagtaaatcttcagtccgcagcaggagaagcagtcctaaaaggaagcgcaatagacactgttcaagtcatcagtcacgttcg

SEQ ID NO: 1079 - DNA, 36 bp, Homo sapiens
caaaagctgatggcacaggttctttgtgaactattt

SEQ ID NO: 1080 - DNA, 36 bp, Homo sapiens
gcccttagcgacaccatggcccgaaatgcagaaaag

SEQ ID NO: 1081 - DNA, 454 bp, Homo sapiens
ggagtttcttggacaggggccgcggggctccaggacggcgcccttagcgacaccatggcccgaaatgcagaaaaggccatgacggccttagcaagatttcgccaggctcagctggaagagggaaaagtgaaggaacgaagaccctttctggcctcagaatgtactgaactgcctaaagctgagaagtggagacgacagatcattggagagatctctaaaaaagtggctcagattcagaatgctggtttaggtgaatttcgaattcgtgacctgaatgatgaaattaacaagctgctaagggagaaaggacactgggaggtccggataaaggagctgggaggtcctgattatggaaaagttggccctaaaatgctggatcatgaaggaaaagaagtcccaggaaaccgaggttacaagtactttggagcagcaaaagatttgcctggtgttagag

SEQ ID NO: 1082 - DNA, 181 bp, Homo sapiens
agacacgtgctgagctcatgaaggcaatcgattttgagtactatggttacctagatgaagatgatggtgttattgtgcctttggaacaggaatatgaaaagaaactcagagccgagttagtggaaaagtggaaagcagagagagaggctcggctggcaagaggagaaaaggaagaggagga

SEQ ID NO: 1083 - DNA, 208 bp, Homo sapiens
ctggatcatgaaggaaaagaagtcccaggaaaccgaggttacaagtactttggagcagcaaaagatttgcctggtgttagagagctgtttgaaaaagaacctcttcctcctcccagaaagacacgtgctgagctcatgaaggcaatcgattttgagtactatggttacctagatgaagatgatggtgttattgtgcctttggaacagg

SEQ ID NO: 1084 - DNA, 500 bp, Homo sapiens
aaaaaagtggctcagattcagaatgctggtttaggtgaatttcgaattcgtgacctgaatgatgaaattaacaagctgctaagggagaaaggacactgggaggtccggataaaggagctgggaggtcctgattatggaaaagttggccctaaaatgctggatcatgaaggaaaagaagtcccaggaaaccgaggttacaagtactttggagcagcaaaagatttgcctggtgttagagagctgtttgaaaaagaacctcttcctcctcccagaaagacacgtgctgagctcatgaaggcaatcgattttgagtactatggttacctagatgaagatgatggtgttattgtgcctttggaacaggaatatgaaaagaaactcagagccgagttagtggaaaagtggaaagcagagagagaggctcggctggcaagaggagaaaaggaagaggaggaggaagaggaggaagagatcaacatctatgcagtcaccgaggagga

SEQ ID NO: 1085 - DNA, 500 bp, Homo sapiens
gccaagtggaacctgcaatcaagaatgaataagaatgaggctatagtgatgaaagaagcaagtaggcaaaaaactgtagctttaaaaaaggcatctaaagtttacaaacaaaggcttgaccattttacaggagctattgaaaagcttacttcccaaattagagatcaggaagccaagttgtctgaaacaatttcagcttccaatgcctggaaaagtcattatgagaaaattgtgatagaaaaaaccgaattggaagtacagattgaaacaatgaaaaagcaaatcattaatcttttggaagatctgaagaaaatggaagaccatggaaaaaattcatgtgaagaaattcttagaaaagttcactcaattgaatatgaaaatgaaactctgaatcttgagaatacaaaattaaagactacacttgctgctttgaaggatgaagttgtatctgttgaaaatgaactctcagaattgcaagaagtagaaaaaaaacagaaaac

SEQ ID NO: 1086 - DNA, 500 bp, Homo sapiens
agcatgttgctagaaaatctaactgataatgaaagtgaaaatactaatcttaagaagaaggtatttgaaaaggaggcccatatccaagaactttcttgtttgtttcagagtgaaaaggcaaatactttgaaagcaaaccgtttttcccaatcagtaaaagtagtacatgaacgactacagatccaaattcataaaagggaagccgagaacgataagttgaaagaatatgtaaagagcttagaaaccaagatagccaagtggaacctgcaatcaagaatgaataagaatgaggctatagtgatgaaagaagcaagtaggcaaaaaactgtagctttaaaaaaggcatctaaagtttacaaacaaaggcttgaccattttacaggagctattgaaaagcttacttcccaaattagagatcaggaagccaagttgtctgaaacaatttcagcttccaatgcctggaaaagtcattatgagaaaattgtgatagaaaaaaccga

SEQ ID NO: 1087 - DNA, 500 bp, Homo sapiens
atctacagaattagtctgcagagcctatggtgaagtgtatgcagccgtgatgaatccaatcaatgaatacaaagatccagagaacattcttcaccgatcgccgcagcaagtgcagacgcttctttcctgattatcttatttcattgtgttagcaaaatatgacctccctaaaacactgaaggttattttttattctttgaatttttactctataatttgatagttacagttttctttgtatcataagattgtaagtcccgataatttttttttttttggtctcagtaacagggaagtaagtaacatgttgacctgagctagtattactgtgtatctactctaaatgagatgatctatttttttgctagccatctctccagctctgcagttttcactgtattcaggaagcataaagtagtatgaaaggtttgaagaatttttttttacaagactagttctaaattaacagcttataaaaaatttgtctaaatttaataatt

SEQ ID NO: 1088 - DNA, 36 bp, Homo sapiens
ttttttcccctcccctaggctatggtgaactaaacg

SEQ ID NO: 1089 - DNA, 500 bp, Homo sapiens
gatgagaagaaagatgatggttatactgccttacatctggctgcccttaataatcacgtagaagtggctgaactgttggtacatcagggtaatgcaaacctggatatccagaatgtgaaccaacaaactgccctacaccttgctgttgaacgacagcatacccagattgttaggcttttggtccgtgcaggtgccaagcttgatattcaggataaggatggggatactcctttgcatgaagctctaaggcatcacactttgtctcagctacgtcagctccaagatatgcaagatgtggggaaggtggatgctgcctgggagccatccaaaaacacgttaataatgggacttggtacccagggggcagagaagaagagtgcagcatctattgcctgtttcttggcagccaatggtgctgacctgagcattcgaaataagaagggtcaatcgccacttgatctctgtcctgatccgaatctctgcaaagcactggcaaagtg

SEQ ID NO: 1090 - DNA, 500 bp, Homo sapiens
gaaattataattttggccaacacaacaaatacagaactgaaagatttgccaaagaggattcccaaggattcagctcgttaccatttctttctgtataaacattcccatgaaggagactatttagagtccatagtttttatttattcaatgcctggatacacatgcagtataagagagcggatgctgtattctagctgcaagagccgtctgctagaaattgtagaaagacaactacaaatggatgtaattagaaagatcgagatagacaatggggatgagttgactgcagacttcctttatgaagaagtacatcccaagcagcatgcacacaagcaaagttttgcaaaaccaaaaggtcctgcaggaaaaagaggaattcgaagactaattaggggcccagcggaaactgaagctactactgattaaagtcatcacattaaacattgtaatactagttttttaaaagtccagcttttagtacaggagaactgaaatcattc

SEQ ID NO: 1091 - DNA, 500 bp, Homo sapiens
ctggatacacatgcagtataagagagcggatgctgtattctagctgcaagagccgtctgctagaaattgtagaaagacaactacaaatggatgtaattagaaagatcgagatagacaatggggatgagttgactgcagacttcctttatgaagaagtacatcccaagcagcatgcacacaagcaaagttttgcaaaaccaaaaggtcctgcaggaaaaagaggaattcgaagactaattaggggcccagcggaaactgaagctactactgattaaagtcatcacattaaacattgtaatactagttttttaaaagtccagcttttagtacaggagaactgaaatcattccatgttgatataaagtagggaaaaaaattgtactttttggaaaatagcacttttcacttctgtgtgtttttaaaattaatgttatagaagactcatgatttctatttttgagttaaagctagaaaagggttcaacataatgtttaattttg

SEQ ID NO: 1092 - DNA, 33 bp, Homo sapiens
taaaaatttggtcaaagactgggatgcttagat

SEQ ID NO: 1093 - DNA, 26 bp, Homo sapiens
tcattaaacctcttcaaccaaatgct

SEQ ID NO: 1094 - DNA, 36 bp, Homo sapiens
taattgggcacgaaagaggtaagtttttgttattca

SEQ ID NO: 1095 - DNA, 36 bp, Homo sapiens
acagggtcgaggatcgagtcacagcaaactgtacaa

SEQ ID NO: 1096 - DNA, 279 bp, Homo sapiens
tctttgttgtatggggctctcagagattatcagaagattggcctggactggctggccaaactttacaggaagaatctcaatggcatattggcagatgaagctgggctgggtaaaacagtgcagatcattgctttttttgcccacctagcttgtaacgaaggtaattggggcccccatcttgttgttgtgagaagttgtaacatactcaagtgggagcttgaattgaaacgttggtgtcccggactcaaaatcctctcatatattggcagccacagagaa

SEQ ID NO: 1097 - DNA, 36 bp, Homo sapiens
aggagctcttcagcgctgcgtacacgtgtaccccag

SEQ ID NO: 1098 - DNA, 147 bp, Homo sapiens
ctccatctgcctgggagatgcaaaggaccccgtctgtctgccctgcgaccacgtgcactgcctgcgctgcctcagggcctggtttgcctcagagcagatgatatgcccctactgtttaactgccttgccagacgaattctctccagc

SEQ ID NO: 1099 - DNA, 500 bp, Homo sapiens
ggattgttcagcagttcggcatttgggatcgaaagcagaaaagcatgtccatgtgtccaaggaatggattgcatatttagtaacccctaatggcagtaataaaactactaggcaagcttctctacgaaaaaaaattagggaacatgatgtttctaaagcccatggtaaaattcaggatttgttaaaggaatcaactaatgattcaatttgtaatttagtgcataaacaaaataataaaaatattgatgctactgtaaaagttttcaatactgtttacagtttagtaaaacataacagacctttatctgatattgagggggcaagagaattacaggaaaaaaatggagaggtaaattgtttaaatacacgttacagtgcaacaagaatagcagaacatattgcaaaagaaatgaagatgaagatatttaagaatattatagaagagaatgccaaaatctgtatcataattgatgaggcatctacagtttcaaagaaaacca

SEQ ID NO: 1100 - DNA, 500 bp, Homo sapiens
gtttgatggatgaatgggaaactcaagtccaaatttctgcttaataccaatttctctgagtttcttgaaatgtctttaaaacagacatttttctcaccaaacagtttgagtatctttattaaggaaacccttacgaatcctgaaaattatgctagcatgatttttttatatatagaagtttaaaaataaaccaggtcaggtttgtatatgtaaaattgttgacatcaatgatgtctttccatattcttatctgggcttaagaaatacattctgtatttttccagattctttgtagcctttgaaagatttttacagtacatatgtcttgactgagctgtcctttcttaatacaaaagcgtgtataattttcttaacttgtacagttggtaaacttttatgagaggaattgttattctgagtctgtcagctttcattttattttgctaaggtttttctaatgaatttttaagtgtttgtgtagtaattaagtcatatttctt

SEQ ID NO: 1101 - DNA, 412 bp, Homo sapiens
atgaccatgaatttgatccatcagctgacatgctggttcatgattttgatgatgaacgaacattagaagaggaagaaatgatggaaggagaaacaaacttcagctctgaaatagaagatcttgcaagggaaggcgacatgccaattcatgaacttctcagcctttatggttatggtagtactgttcgactacctgaagaagatgaggaagaggaagaagaggaagaagaaggtgaagatgatgaagatgctgataatgatgacaacagtggctgtagtggggaaaataaagaggagaatataaaggattcatcaggtcaggaggatgaaactcagtcttccaatgatgatccatcacaatctgttgcttctcaagatgcccaggaaataatccgcccacgtcgatgtaaata

SEQ ID NO: 1102 - DNA, 500 bp, Homo sapiens
agggatggacctcttgtacttataggcagtgggctgtcttcagaacaacagaaaatgctcagtgagcttgcagtaattcttaaggctaaaaaatatactgagtttgacagtacagtaactcatgttgttgttcctggtgatgcagttcaaagtaccttgaagtgtatgcttgggattctcaatggatgctggattctaaaatttgaatgggtaaaagcatgtctacgaagaaaagtatgtgaacaggaagaaaagtatgaaattcctgaaggtccacgcagaagcaggctcaacagagaacagctgttgccaaagctgtttgatggatgctacttctatttgtggggaaccttcaaacaccatccaaaggacaaccttattaagctcgtcactgcaggtgggggccagatcctcagtagaaagcccaagccagacagtgacgtgactcagaccatcaatacagtcgcataccatgcgagacccgattctgatcagcgctt

SEQ ID NO: 1103 - DNA, 74 bp, Homo sapiens
caaggatttcacagaagaacttggagcaaaaattcccactgtcatagctataggctgtccagtcttgagggagc

SEQ ID NO: 1104 - DNA, 96 bp, Homo sapiens
aggagaggcggtcccggtgtcctcgggtcccaggtgattgtgaagtgctgaccaattgccactggacatacttgaaacaaaataggaaaatggcag

SEQ ID NO: 1105 - DNA, 500 bp, Homo sapiens
ctaaaccatttcagctgcccttcagaccccaggacgacttgttggcccgagcccttgctcagggccccaagacagttgatgtgccagcctccctcccaacaccacctcataacaatcaggaagaattaaggatacaggatcactgtggtgatcgagatactcctgacagttttgttccctcatcctctcctgagagtgtggttggggtagaagtgagcaggtatccagatctgtcattggtcaaggaggagcctccagaaccggtgccgtcccccatcattccaattcttcctagcactgctgggaaaagttcagaatcaagaaggaatgacatcaaaactgagccaggcactttatattttgcgtcaccttttggtccttccccaaatggtcccagatcaggtcttatatctgtagcaattactctgcatcctacagctgctgagaacattagcagtgttgtggctgcattttccgaccttcttcacgtccgaatccct

SEQ ID NO: 1106 - DNA, 139 bp, Homo sapiens
ggagtcagtctccatggagattatctttgataacagatttcttctggggaatagctgagtttgtggttttgtttttcaaaactctgcttcagcaagatgtgaaaaaaagaagaagctatggaaactcatctgattccag

SEQ ID NO: 1107 - DNA, 116 bp, Homo sapiens
attgaaaaggcatttctatttgatgtggtcagtaaaatttatattgcaactgatagtactccggtggatatgcaaacctatgagctctgctgtgatatgatagatgtggttattga

SEQ ID NO: 1108 - DNA, 36 bp, Homo sapiens
gaatctcaagctgctaaggatctcctgtatcgaagg

SEQ ID NO: 1109 - DNA, 36 bp, Homo sapiens
gaaacaggaactggaagctgaatatttggcaatatt

SEQ ID NO: 1110 - DNA, 156 bp, Homo sapiens
cataaccgagttaaggatgcatctgctaaatctgatagaatgacaagatcccacaaaagtgctgcagatgattacaatagaattggttcttcattatatgctttaggaactcaggattctacagatatatgcaagttttttctcaaagtttcagaa

SEQ ID NO: 1111 - DNA, 27 bp, Homo sapiens
aacgaacatttcttttggagtatcata

SEQ ID NO: 1112 - DNA, 26 bp, Homo sapiens
attcacaaagatgaaacaggaactgg

SEQ ID NO: 1113 - DNA, 36 bp, Homo sapiens
aagggtcaatgacgaaggaagaattcacaaagatga

SEQ ID NO: 1114 - DNA, 334 bp, Homo sapiens
gaaggcctggacgacggcccggacttcctctcagaagaggaccgcggacttaaagcaataaatgtagatcttcaaagtgatgctgctctgcaggtggacatttctgatgctcttagtgagcgggataaagtaaaattcactgttcacacaaagagttcattgccaaattttaaacaaaacgagttttcagttgttcggcaacatgaggaatttatctggcttcatgattcctttgttgaaaatgaagactatgcaggttatatcattccaccagcaccaccaagacctgattttgatgcttcaagggaaaaactacagaagcttggtgaaggag

SEQ ID NO: 1115 - DNA, 93 bp, Homo sapiens
caagaagacagttgcgatgcatgaagtgttcctgtgtcgtgtggcagcacatcctattttgagaagagatttaaatttccatgtcttcttgga

SEQ ID NO: 1116 - DNA, 500 bp, Homo sapiens
aaaagagaaacttgaagacttctttaaaaacatggttaaatcagcagatggagtaatcgtttcaggagtaaaggatgtagatgatttctttgagcacgaacgaacatttcttttggagtatcataaccgagttaaggatgcatctgctaaatctgatagaatgacaagatcccacaaaagtgctgcagatgattacaatagaattggttcttcattatatgctttaggaactcaggattctacagatatatgcaagttttttctcaaagtttcagaactgttcgataaaacaagaaaaatagaagcacgagtgtctgctgatgaagacctcaaactttctgatcttttaaaatattacttaagagaatctcaagctgctaaggatctcctgtatcgaaggtctaggtcactagtggattatgaaaatgctaataaagcactggataaagcaagagcaaaaaataaagatgttctacaggccgaaacttcccaacaattat

SEQ ID NO: 1117 - DNA, 36 bp, Homo sapiens
cttacatctccaccatcggaattgatttcaagatcc

SEQ ID NO: 1118 - DNA, 392 bp, Homo sapiens
tccgcttccgtccacttggcgagtgagacgctgatgggaggatggacgtactggtgtctgagtgctccgcgcggctgctgcagcaggaagaagagattaaatctctgactgctgaaattgaccggttgaaaaactgtggctgtttaggagcttctccaaatttggagcagttacaagaagaaaatttaaaattaaagtatcgactgaatattcttcgaaagagtcttcaggcagaaaggaacaaaccaactaaaaatatgattaacattattagccgcctacaagaggtctttggtcatgcaattaaggctgcatatccagatttggaaaatcctcctctgctagtgacaccaagtcagcaggccaagtttggggactatcagtgtaatagt

SEQ ID NO: 1119 - DNA, 36 bp, Homo sapiens
agcaagcagtcttgtgagttaagtccatcaaagtta

SEQ ID NO: 1120 - DNA, 42 bp, Homo sapiens
gtcaatccattcatcaaaagcaacaaacatcgtatgatcatg

SEQ ID NO: 1121 - DNA, 500 bp, Homo sapiens
cgcttgtattaccgagtaatggaatccatgcttaaatcagaagaagaacgattatccattcaaaattttagcaaacttctgaatgacaacatttttcatatgtctttattggcgtgcgctcttgaggttgtaatggccacatatagcagaagtacatctcagaatcttgattctggaacagatttgtctttcccatggattctgaatgtgcttaatttaaaagcctttgatttttacaaagtgatcgaaagttttatcaaagcagaaggcaacttgacaagagaaatgataaaacatttagaacgatgtgaacatcgaatcatggaatcccttgcatggctctcagattcacctttatttgatcttattaaacaatcaaaggaccgagaaggaccaactgatcaccttgaatctgcttgtcctcttaatcttcctctccagaataatcacactgcagcagatatgtatctttctcctgtaagatctccaaagaaaaaagg

SEQ ID NO: 1122 - DNA, 500 bp, Homo sapiens
gtgatcaaccttcagaaaatctgatttcctattttaacaactgcacagtgaatccaaaagaaagtatactgaaaagagtgaaggatataggatacatctttaaagagaaatttgctaaagctgtgggacagggttgtgtcgaaattggatcacagcgatacaaacttggagttcgcttgtattaccgagtaatggaatccatgcttaaatcagaagaagaacgattatccattcaaaattttagcaaacttctgaatgacaacatttttcatatgtctttattggcgtgcgctcttgaggttgtaatggccacatatagcagaagtacatctcagaatcttgattctggaacagatttgtctttcccatggattctgaatgtgcttaatttaaaagcctttgatttttacaaagtgatcgaaagttttatcaaagcagaaggcaacttgacaagagaaatgataaaacatttagaacgatgtgaacatcgaatcatggaa

SEQ ID NO: 1123 - DNA, 278 bp, Homo sapiens
gaggtcagaggggaggaggactctggagctgacagcgcgcacttcacccgcagttgttctagcgactgcgaagatagctcgctgagctggaaccccacagatcaccaacaaaaatgaaggcggcagatgagcctgcctacctgacagtgggaaccgatgtcagtgccaagtaccgaggtgccttctgtgaggcaaagattaagactgtgaaaaggctggtgaaagttaaggtactcctgaaacaggataataccacacaattggtacaagatgaccaa

SEQ ID NO: 1124 - DNA, 36 bp, Homo sapiens
ggtccgcgttaaatgcaacacggatgataccatcgg

SEQ ID NO: 1125 - DNA, 66 bp, Homo sapiens
ggaccttaagaagctgattgcagcccaaactggtacccgttggaacaagattgtcctgaagaagtg

SEQ ID NO: 1126 - DNA, 36 bp, Homo sapiens
aagagagtggacgtgcaggtatgtaggactcaaatc

SEQ ID NO: 1127 - DNA, 36 bp, Homo sapiens
aggcaaaacggaggctgggtatgtgtgatggaaaaa

SEQ ID NO: 1128 - DNA, 271 bp, Homo sapiens
agaaaggcagacaacagcttctgagctttggactaatcacagcctctgttctcagcaggagccccaacactgagaccagaaaagatggtgctatgctttcctcttcttttactgctgctggttctatggggaccagtgtgtccacttcatgcttggcctaagcgtctcaccaaggctcactggtttgaaattcagcatatacagccaagtcctctccaatgcaacagggcaatgagtggcatcaacaattatacccagcactgtaagcatc

SEQ ID NO: 1129 - DNA, 118 bp, Homo sapiens
cacattcactttcaactttaacaatgaaccttgggtcagaggacggcatgagacttacctgtgttatgaggtggagcgcatgcacaatgacacctgggtcctgctgaaccagcgcagg

SEQ ID NO: 1130 - DNA, 350 bp, Homo sapiens
agttcttcactaccacaaccaaggagggatatgataggcggccagtggatataactcctttagaacaaaggaaattaacttttgatacccatgcattggttcaggacttggaaactcatggatttgacaaaacacaagcagaaacaattgtatcagcgttaactgctttatcaaatgtcagcctggatactatctataaagagatggtcactcaagctcaacaggaaataacagtacaacagctaatggctcatttggatgctatcaggaaagacatggtcatcctagagaaaagtgaatttgcaaatctgagagcagagaatgagaaaatgaaaattgaattagaccaa

SEQ ID NO: 1131 - DNA, 53 bp, Homo sapiens
atgaaaccagtcgaatcagagcagataataaactggatatcaacttagaaagg

SEQ ID NO: 1132 - DNA, 500 bp, Homo sapiens
ccaaacggttctgcttggtgccatccatggagggcgtgcgctgggccttttcctgcggcacttggctgccgagccgagccgaatggctgctggcagtgcgatcgattcagcccgaggagaaggagcgcattggccagttcgtctttgcccgggacgctaaggcagccatggctggtcgtctgatgataaggaaattagttgcagagaaattgaatatcccttggaatcatattcgtttgcaaagaactgcaaaaggaaaaccagttcttgcaaaggactcatcgaatccttacccgaatttcaactttaacatctctcatcaaggagactatgcagtgcttgctgctgaacctgagctgcaagttggaattgatataatgaagactagttttccaggtcgtggttcaattccagaattctttcatattatgaaaagaaagtttaccaacaaagaatgggaaacaatcagaagctttaaggatgagtggactcagctggat

SEQ ID NO: 1133 - DNA, 50 bp, Homo sapiens
aatactaaagcaagactactctatgaagccaatcttccagagaactttcg

SEQ ID NO: 1134 - DNA, 273 bp, Homo sapiens
ctagagtgtcgaagatgccatgttaagtgccacagagatcacttagataagaaagaggacttaatttgtccatgtaaagtaagttatgatgtaacatcagcaagagatatgctgctgttagcatgttctcaggatgaacaaaaaaaatgggtaactcatttagtaaagaaaatccctaagaatccaccatctggttttgttcgtgcttcccctcgaacgctttctacaagatccactgcaaatcagtctttccggaaagtggtcaaaaataca

SEQ ID NO: 1135 - DNA, 456 bp, Homo sapiens
ggtgaatgtagaaaagatgtagagatggaaccagtacaacaagctgaaaaaactaatttccaaaatcacaaaggccatgagtttattcctacactctaccactttcctgccaattgtgatgcctgtgccaaacctctctggcatgtttttaagccaccccctgccctagagtgtcgaagatgccatgttaagtgccacagagatcacttagataagaaagaggacttaatttgtccatgtaaagtaagttatgatgtaacatcagcaagagatatgctgctgttagcatgttctcaggatgaacaaaaaaaatgggtaactcatttagtaaagaaaatccctaagaatccaccatctggttttgttcgtgcttcccctcgaacgctttctacaagatccactgcaaatcagtctttccggaaagtggtcaaaaatacatctggaaaaactagttaa

SEQ ID NO: 1136 - DNA, 226 bp, Homo sapiens
ggtgaatgtagaaaagatgtagagatggaaccagtacaacaagctgaaaaaactaatttccaaaatcacaaaggccatgagtttattcctacactctaccactttcctgccaattgtgatgcctgtgccaaacctctctggcatgtttttaagccaccccctgccctagagtgtcgaagatgccatgttaagtgccacagagatcacttagataagaaagaggact

SEQ ID NO: 1137 - DNA, 98 bp, Homo sapiens
atgctcggaaacgcttggtgatacaagataaaaataaatacaacacacccaaatacaggatgatagttcgtgtgacaaacagagatatcatttgtcag

SEQ ID NO: 1138 - DNA, 99 bp, Homo sapiens
gagggggatatgatagtctgcgcagcgtatgcacacgaactgccaaaatatggtgtgaaggttggcctgacaaattatgctgcagcatattgtactggc

SEQ ID NO: 1139 - DNA, 249 bp, Homo sapiens
ggcccttttcccaccccctagcgccgctgggcctgcaggtctctgtcgagcagcggacgccggtctctgttccgcaggatggggtttgttaaagttgttaagaataaggcctactttaagagataccaagtgaaatttagaagacgacgagagggtaaaactgattattatgctcggaaacgcttggtgatacaagataaaaataaatacaacacacccaaatacaggatgatagttcgtgtgacaaac

SEQ ID NO: 1140 - DNA, 511 bp, Homo sapiens
gagaagccagatactaaagagaagaaacccgaagccaagaaggttgatgctggtggcaaggtgaaaaagggtaacctcaaagctaaaaagcccaagaaggggaagccccattgcagccgcaaccctgtccttgtcagaggaattggcaggtattcccgatctgccatgtattccagaaaggccatgtacaagaggaagtactcagccgctaaatccaaggttgaaaagaaaaagaaggagaaggttctcgcaactgttacaaaaccagttggtggtgacaagaacggcggtacccgggtggttaaacttcgcaaaatgcctagatattatcctactgaagatgtgcctcgaaagctgttgagccacggcaaaaaacccttcagtcagcacgtgagaaaactgcgagccagcattacccccgggaccattctgatcatcctcactggacgccacaggggcaagagggtggttttcctgaagcagctggctagtggcttattacttgtgactg

SEQ ID NO: 1141 - DNA, 31 bp, Homo sapiens
gagttcctctacgaagaacacaccagaaatt

SEQ ID NO: 1142 - DNA, 180 bp, Homo sapiens
aaggttgatgctggtggcaaggtgaaaaagggtaacctcaaagctaaaaagcccaagaaggggaagccccattgcagccgcaaccctgtccttgtcagaggaattggcaggtattcccgatctgccatgtattccagaaaggccatgtacaagaggaagtactcagccgctaaatccaag

SEQ ID NO: 1143 - DNA, 36 bp, Homo sapiens
atctgccatgtattccagaaaggccatgtacaagag

SEQ ID NO: 1144 - DNA, 219 bp, Homo sapiens
atggcgggtgaaaaagttgagaagccagatactaaagagaagaaacccgaagccaagaaggttgatgctggtggcaaggtgaaaaagggtaacctcaaagctaaaaagcccaagaaggggaagccccattgcagccgcaaccctgtccttgtcagaggaattggcaggtattcccgatctgccatgtattccagaaaggccatgtacaagaggaagtac

SEQ ID NO: 1145 - DNA, 272 bp, Homo sapiens
gattgcttatagaccggaagccgggaccttaattctctttcccatcttgcaagatggcgggtgaaaaagttgagaagccagatactaaagagaagaaacccgaagccaagaaggttgatgctggtggcaaggtgaaaaagggtaacctcaaagctaaaaagcccaagaaggggaagccccattgcagccgcaaccctgtccttgtcagaggaattggcaggtattcccgatctgccatgtattccagaaaggccatgtacaagaggaagtac

SEQ ID NO: 1146 - DNA, 500 bp, Homo sapiens
gaagatgtgcctcgaaagctgttgagccacggcaaaaaacccttcagtcagcacgtgagaaaactgcgagccagcattacccccgggaccattctgatcatcctcactggacgccacaggggcaagagggtggttttcctgaagcagctggctagtggcttattacttgtgactggacctctggtcctcaatcgagttcctctacgaagaacacaccagaaatttgtcattgccacttcaaccaaaatcgatatcagcaatgtaaaaatcccaaaacatcttactgatgcttacttcaagaagaagaagctgcggaagcccagacaccaggaaggtgagatcttcgacacagaaaaagagaaatatgagattacggagcagcgcaagattgatcagaaagctgtggactcacaaattttaccaaaaatcaaagctattcctcagctccagggctacctgcgatctgtgtttgctctgacgaatggaatttatcctcacaa

SEQ ID NO: 1147 - DNA, 258 bp, Homo sapiens
aagagaagaagaaggaggttcctgctgtgccagaaacccttaagaaaaagcgaaggaatttcgcagagctgaagatcaagcgcctgagaaagaagtttgcccaaaagatgcttcgaaaggcaaggaggaagcttatctatgaaaaagcaaagcactatcacaaggaatataggcagatgtacagaactgaaattcgaatggcgaggatggcaagaaaagctggcaacttctatgtacctgcagaacccaaattggcgt

SEQ ID NO: 1148 - DNA, 183 bp, Homo sapiens
ctctttttccggctggaaccatggagggtgtagaagagaagaagaaggaggttcctgctgtgccagaaacccttaagaaaaagcgaaggaatttcgcagagctgaagatcaagcgcctgagaaagaagtttgcccaaaagatgcttcgaaaggcaaggaggaagcttatctatgaaaaagcaa

SEQ ID NO: 1149 - DNA, 46 bp, Homo sapiens
gcagcttcttcgccttcgtcaaatcttcaatggaacctttgtgaag

SEQ ID NO: 1150 - DNA, 26 bp, Homo sapiens
acaagatgaggtctgtgtatgctcac

SEQ ID NO: 1151 - DNA, 25 bp, Homo sapiens
ctttctttgctgcgtctactgcgag

SEQ ID NO: 1152 - DNA, 172 bp, Homo sapiens
ttctttctttgctgcgtctactgcgagaatgaagactattctcagcaatcagactgtcgacattccagaaaatgtcgacattactctgaagggacgcacagttatcgtgaagggccccagaggaaccctgcggagggacttcaatcacatcaatgtagaactcagccttctt

SEQ ID NO: 1153 - DNA, 25 bp, Homo sapiens
ttctcagcaatcagactgtcgacat

SEQ ID NO: 1154 - DNA, 80 bp, Homo sapiens
gacgcacagttatcgtgaagggccccagaggaaccctgcggagggacttcaatcacatcaatgtagaactcagccttctt

SEQ ID NO: 1155 - DNA, 609 bp, Homo sapiens
ttctcttcctgctctccatcatggcgcaggatcaaggtgaaaaggagaaccccatgcgggaacttcgcatccgcaaactctgtctcaacatctgtgttggggagagtggagacagactgacgcgagcagccaaggtgttggagcagctcacagggcagacccctgtgttttccaaagctagatacactgtcagatcctttggcatccggagaaatgaaaagattgctgtccactgcacagttcgaggggccaaggcagaagaaatcttggagaagggtctaaaggtgcgggagtatgagttaagaaaaaacaacttctcagatactggaaactttggttttgggatccaggaacacatcgatctgggtatcaaatatgacccaagcattggtatctacggcctggacttctatgtggtgctgggtaggccaggtttcagcatcgcagacaagaagcgcaggacaggctgcattggggccaaacacagaatcagcaaagaggaggccatgcgctggttccagcagaagtatgatgggatcatccttcctggcaaataaattcccgtttctatccaaaagagcaataaaaagttttcagtgaaatgtgcaa

SEQ ID NO: 1156 - DNA, 36 bp, Homo sapiens
gttggcaggtgtgcgcaggccaagcaatggggctgg

SEQ ID NO: 1157 - DNA, 212 bp, Homo sapiens
aaaaagcttgtggtgaaggggggcaaaaaaaagaagcaagttctgaagttcactcttgattgcacccaccctgtagaagatggaatcatggatgctgccaattttgagcagtttttgcaagaaaggatcaaagtgaacggaaaagctgggaaccttggtggaggggtggtgaccatcgaaaggagcaagagcaagatcaccgtgacatccga

SEQ ID NO: 1158 - DNA, 329 bp, Homo sapiens
ctttctaactccgctgccgccatggctcctgtgaaaaagcttgtggtgaaggggggcaaaaaaaagaagcaagttctgaagttcactcttgattgcacccaccctgtagaagatggaatcatggatgctgccaattttgagcagtttttgcaagaaaggatcaaagtgaacggaaaagctgggaaccttggtggaggggtggtgaccatcgaaaggagcaagagcaagatcaccgtgacatccgaggtgcctttctccaaaaggtatttgaaatatctcaccaaaaaatatttgaagaagaataatctacgtgactggttgcgcgtagt

SEQ ID NO: 1159 - DNA, 500 bp, Homo sapiens
gggggcaaaaaaaagaagcaagttctgaagttcactcttgattgcacccaccctgtagaagatggaatcatggatgctgccaattttgagcagtttttgcaagaaaggatcaaagtgaacggaaaagctgggaaccttggtggaggggtggtgaccatcgaaaggagcaagagcaagatcaccgtgacatccgaggtgcctttctccaaaaggtatttgaaatatctcaccaaaaaatatttgaagaagaataatctacgtgactggttgcgcgtagttgctaacagcaaagagagttacgaattacgttacttccagattaaccaggacgaagaagaggaggaagacgaggattaaatttcatttatctggaaaattttgtatgagttcttgaataaaacttgggaaccaaaatggtggtttatccttgtatctctgcagtgtggattgaacagaaaattggaaatcatagtcaaagggcttcccttggttcgccactc

SEQ ID NO: 1160 - DNA, 438 bp, Homo sapiens
gggggcaaaaaaaagaagcaagttctgaagttcactcttgattgcacccaccctgtagaagatggaatcatggatgctgccaattttgagcagtttttgcaagaaaggatcaaagtgaacggaaaagctgggaaccttggtggaggggtggtgaccatcgaaaggagcaagagcaagatcaccgtgacatccgaggtgcctttctccaaaaggtatttgaaatatctcaccaaaaaatatttgaagaagaataatctacgtgactggttgcgcgtagttgctaacagcaaagagagttacgaattacgttacttccagattaaccaggacgaagaagaggaggaagacgaggattaaatttcatttatctggaaaattttgtatgagttcttgaataaaacttgggaaccaaaatggtggtttatccttgtatctctg

SEQ ID NO: 1161 - DNA, 36 bp, Homo sapiens
tggagctgtcgccatgaaggtcgagctgtgcagttt

SEQ ID NO: 1162 - DNA, 370 bp, Homo sapiens
ggtcgagctgtgcagttttagcgggtacaagatctaccccggacacgggaggcgctacgccaggaccgacgggaaggttttccagtttcttaatgcgaaatgcgagtcggctttcctttccaagaggaatcctcggcagataaactggactgtcctctacagaaggaagcacaaaaagggacagtcggaagaaattcaaaagaaaagaacccgccgagcagtcaaattccagagggccattactggtgcatctcttgctgatataatggccaagaggaatcagaaacctgaagttagaaaggctcaacgagaacaagctatcagggctgctaaggaagcaaaaaaggctaagcaagcatctaaaaagact

SEQ ID NO: 1163 - DNA, 352 bp, Homo sapiens
tttcttttcgccatcttttgtctttccgtggagctgtcgccatgaaggtcgagctgtgcagttttagcgggtacaagatctaccccggacacgggaggcgctacgccaggaccgacgggaaggttttccagtttcttaatgcgaaatgcgagtcggctttcctttccaagaggaatcctcggcagataaactggactgtcctctacagaaggaagcacaaaaagggacagtcggaagaaattcaaaagaaaagaacccgccgagcagtcaaattccagagggccattactggtgcatctcttgctgatataatggccaagaggaatcagaaacctgaagttagaaaggctca

SEQ ID NO: 1164 - DNA, 36 bp, Homo sapiens
  misc_feature (1)..(7): n is a, c, g, or t
nnnnnnngtcgccatgaaggtcgagctgtgcagttt

SEQ ID NO: 1165 - DNA, 217 bp, Homo sapiens
tctttcttttcgccatcttttgtctttccgtggagctgtcgccatgaaggtcgagctgtgcagttttagcgggtacaagatctaccccggacacgggaggcgctacgccaggaccgacgggaaggttttccagtttcttaatgcgaaatgcgagtcggctttcctttccaagaggaatcctcggcagataaactggactgtcctctacagaaggaag

SEQ ID NO: 1166 - DNA, 36 bp, Homo sapiens
gccgggtggttgctgccgaaatgggcaagttcatga

SEQ ID NO: 1167 - DNA, 36 bp, Homo sapiens
caacttggacgctgcagaatggctcccgcaaagaag

SEQ ID NO: 1168 - DNA, 36 bp, Homo sapiens
caagcgcatccatggagtgggcttcaagaagcgtgc

SEQ ID NO: 1169 - DNA, 89 bp, Homo sapiens
ggtggcgagaagaaaaagggccgttctgccatcaacgaagtggtaacccgagaatacaccatcaacattcacaagcgcatccatggagt

SEQ ID NO: 1170 - DNA, 160 bp, Homo sapiens
gggcttcaagaagcgtgcacctcgggcactcaaagagattcggaaatttgccatgaaggagatgggaactccagatgtgcgcattgacaccaggctcaacaaagctgtctgggccaaaggaataaggaatgtgccataccgaatccgtgtgcggctgtcc

SEQ ID NO: 1171 - DNA, 215 bp, Homo sapiens
atggctcccgcaaagaagggtggcgagaagaaaaagggccgttctgccatcaacgaagtggtaacccgagaatacaccatcaacattcacaagcgcatccatggagtgggcttcaagaagcgtgcacctcgggcactcaaagagattcggaaatttgccatgaaggagatgggaactccagatgtgcgcattgacaccaggctcaacaaagctgt

SEQ ID NO: 1172 - DNA, 328 bp, Homo sapiens
atggctcccgcaaagaagggtggcgagaagaaaaagggccgttctgccatcaacgaagtggtaacccgagaatacaccatcaacattcacaagcgcatccatggagtgggcttcaagaagcgtgcacctcgggcactcaaagagattcggaaatttgccatgaaggagatgggaactccagatgtgcgcattgacaccaggctcaacaaagctgtctgggccaaaggaataaggaatgtgccataccgaatccgtgtgcggctgtccagaaaacgtaatgaggatgaagattcaccaaataagctatatactttggttacctatgtac

SEQ ID NO: 1173 - DNA, 25 bp, Homo sapiens
gtgccataccgaatccgtgtgcggc

SEQ ID NO: 1174 - DNA, 36 bp, Homo sapiens
aatccgtgtgcggctgtccagaaaacgtaatgagga

SEQ ID NO: 1175 - DNA, 106 bp, Homo sapiens
gcttcaagaagcgtgcacctcgggcactcaaagagattcggaaatttgccatgaaggagatgggaactccagatgtgcgcattgacaccaggctcaacaaagctgt

SEQ ID NO: 1176 - DNA, 71 bp, Homo sapiens
ggtggcgagaagaaaaagggccgttctgccatcaacgaagtggtaacccgagaatacaccatcaacattca

SEQ ID NO: 1177 - DNA, 25 bp, Homo sapiens
cttcctttccaacttggacgctgca

SEQ ID NO: 1178 - DNA, 90 bp, Homo sapiens
acctcgggcactcaaagagattcggaaatttgccatgaaggagatgggaactccagatgtgcgcattgacaccaggctcaacaaagctgt

SEQ ID NO: 1179 - DNA, 116 bp, Homo sapiens
cttcctttccaacttggacgctgcagaatggctcccgcaaagaagggtggcgagaagaaaaagggccgttctgccatcaacgaagtggtaacccgagaatacaccatcaacattca

SEQ ID NO: 1180 - DNA, 242 bp, Homo sapiens
cttcctttccaacttggacgctgcagaatggctcccgcaaagaagggtggcgagaagaaaaagggccgttctgccatcaacgaagtggtaacccgagaatacaccatcaacattcacaagcgcatccatggagtgggcttcaagaagcgtgcacctcgggcactcaaagagattcggaaatttgccatgaaggagatgggaactccagatgtgcgcattgacaccaggctcaacaaagctgt

SEQ ID NO: 1181 - DNA, 25 bp, Homo sapiens
cctcttccggggacgttgtctgcag

SEQ ID NO: 1182 - DNA, 500 bp, Homo sapiens
tatcgaggagcagaaaatcgttgtgaaagtgttgaaggcacaagcacagagtcagaaagctaaataaaaaaatgaaacttttttgagtaataaaaatgaaaagacgctgtccaatagaaaaagttggtgtgctggagctacctcacctcagcttgagagagccagttgtgtgcatctctttccagttttgcatccagtgacgtctgcttggcatcttgagattgttatggtgagagtatttacacctcagcaaatgctgcaaaatcctgttttcccccagagagctggaggttaaatactaccagcacatccctagatactactcaagttacagtatatgatcactaatatagtatgctcttggtaccaggagctctgatatatatctggtacatgtttgataatgacttgattgttattataagtacttattaatacttcgattctgtaaagagtttagggtttgattttataaaatccaaaatgagccttttattgaa

SEQ ID NO: 1183 - DNA, 36 bp, Homo sapiens
tgcgccatgagagccaagtggaggaagaagcgaatg

SEQ ID NO: 1184 - DNA, 36 bp, Homo sapiens
ttagcgccatttttttggaaacctctgcgccatgag

SEQ ID NO: 1185 - DNA, 25 bp, Homo sapiens
aaacctctgcgccatgagagccaag

SEQ ID NO: 1186 - DNA, 36 bp, Homo sapiens
agcgctcacgcaagcatggttaacgtccctaaaacc

SEQ ID NO: 1187 - DNA, 36 bp, Homo sapiens
gcaaaagcgtcccaggagccgtactctgacagctgt

SEQ ID NO: 1188 - DNA, 29 bp, Homo sapiens
ccaactcgaaaaagccgtacaaaaaataa

SEQ ID NO: 1189 - DNA, 36 bp, Homo sapiens
ccagctgccaacaccaagattggcccccgccgcatc

SEQ ID NO: 1190 - DNA, 36 bp, Homo sapiens
gaccctgcagccgcagagatgttgatgcctaagaag

SEQ ID NO: 1191 - DNA, 36 bp, Homo sapiens
gtcatgaaggccatgcagtctctcaagtcccgaggc

SEQ ID NO: 1192 - DNA, 36 bp, Homo sapiens
gacggagtgctgtgccacctggtgccgacaagaaag

SEQ ID NO: 1193 - DNA, 421 bp, Homo sapiens
catgtcatgaaggccatgcagtctctcaagtcccgaggctacgtgaaggaacagtttgcctggagacatttctactggtaccttaccaatgagggtatccagtatctccgtgattaccttcatctgcccccggagattgtgcctgccaccctacgccgtagccgtccagagactggcaggcctcggcctaaaggtctggagggtgagcgacctgcgagactcacaagaggggaagctgacagagatacctacagacggagtgctgtgccacctggtgccgacaagaaagccgaggctggggctgggtcagcaaccgaattccagtttagaggcggatttggtcgtggacgtggtcagccacctcagtaaaattggagaggattcttttgcattgaataaacttacagccaaaaaaccttaa

SEQ ID NO: 1194 - DNA, 438 bp, Homo sapiens
atgttgatgcctaagaagaaccggattgccatttatgaactcctttttaaggagggagtcatggtggccaagaaggatgtccacatgcctaagcacccggagctggcagacaagaatgtgcccaaccttcatgtcatgaaggccatgcagtctctcaagtcccgaggctacgtgaaggaacagtttgcctggagacatttctactggtaccttaccaatgagggtatccagtatctccgtgattaccttcatctgcccccggagattgtgcctgccaccctacgccgtagccgtccagagactggcaggcctcggcctaaaggtctggagggtgagcgacctgcgagactcacaagaggggaagctgacagagatacctacagacggagtgctgtgccacctggtgccgacaagaaagccgaggctggggctgggtca

SEQ ID NO: 1195 - DNA, 136 bp, Homo sapiens
tacgtgaaggaacagtttgcctggagacatttctactggtaccttaccaatgagggtatccagtatctccgtgattaccttcatctgcccccggagattgtgcctgccaccctacgccgtagccgtccagagactg

SEQ ID NO: 1196 - DNA, 42 bp, Homo sapiens
ctgcgagactcacaagaggggaagctgacagagatacctaca

SEQ ID NO: 1197 - DNA, 372 bp, Homo sapiens
ggaagagacgcagcaccgcgcatgctccttcctttccagccccggtaccggaccctgcagccgcagagatgttgatgcctaagaagaaccggattgccatttatgaactcctttttaaggagggagtcatggtggccaagaaggatgtccacatgcctaagcacccggagctggcagacaagaatgtgcccaaccttcatgtcatgaaggccatgcagtctctcaagtcccgaggctacgtgaaggaacagtttgcctggagacatttctactggtaccttaccaatgagggtatccagtatctccgtgattaccttcatctgcccccggagattgtgcctgccaccctacgccgtagccgtccagagactg

SEQ ID NO: 1198 - DNA, 450 bp, Homo sapiens
ggaagagacgcagcaccgcgcatgctccttcctttccagccccggtaccggaccctgcagccgcagagatgttgatgcctaagaagaaccggattgccatttatgaactcctttttaaggagggagtcatggtggccaagaaggatgtccacatgcctaagcacccggagctggcagacaagaatgtgcccaaccttcatgtcatgaaggccatgcagtctctcaagtcccgaggctacgtgaaggaacagtttgcctggagacatttctactggtaccttaccaatgagggtatccagtatctccgtgattaccttcatctgcccccggagattgtgcctgccaccctacgccgtagccgtccagagactggcaggcctcggcctaaaggtctggagggtgagcgacctgcgagactcacaagaggggaagctgacagagatacctaca

SEQ ID NO: 1199 - DNA, 372 bp, Homo sapiens
aaatggcacctcgaaaggggaaggaaaagaaggaagaacaggtcatcagcctcggacctcaggtggctgaaggagagaatgtatttggtgtctgccatatctttgcatccttcaatgacacttttgtccatgtcactgatctttctggcaaggaaaccatctgccgtgtgactggtgggatgaaggtaaaggcagaccgagatgaatcctcaccatatgctgctatgttggctgcccaggatgtggcccagaggtgcaaggagctgggtatcaccgccctacacatcaaactccgggccacaggaggaaataggaccaagacccctggacctggggcccagtcggccctcagagcccttgcccgctcgggta

SEQ ID NO: 1200 - DNA, 346 bp, Homo sapiens
gactggtgggatgaaggtaaaggcagaccgagatgaatcctcaccatatgctgctatgttggctgcccaggatgtggcccagaggtgcaaggagctgggtatcaccgccctacacatcaaactccgggccacaggaggaaataggaccaagacccctggacctggggcccagtcggccctcagagcccttgcccgctcgggtatgaagatcgggcggattgaggatgtcacccccatcccctctgacagcactcgcaggaaggggggtcgccgtggtcgccgtctgtgaacaagattcctcaaaatattttctgttaataaattgccttcatgtaaactgtttcaa

SEQ ID NO: 1201 - DNA, 36 bp, Homo sapiens
acaggcaggctaaacaagtgtggggtgatcagcccc

SEQ ID NO: 1202 - DNA, 120 bp, Homo sapiens
ccacaatggtgcgcatgaatgtcctggcagatgctctcaagagtatcaacaatgccgaaaagagaggcaaacgccaggtgcttattaggccgtgctccaaagtcatcgtccggtttctca

SEQ ID NO: 1203 - DNA, 36 bp, Homo sapiens
tgacaacctcagctggcatcatggaccatgaagaag

SEQ ID NO: 1204 - DNA, 100 bp, Homo sapiens
caagacgaaaacacacaggagggaaaatcctgggattctttttctagggatgtaatacatatatttacaaataaaatgcctcatggactctggtgcttcc

SEQ ID NO: 1205 - DNA, 30 bp, Homo sapiens
gagctccaatttcatccgtctgccatcggc

SEQ ID NO: 1206 - DNA, 36 bp, Homo sapiens
cgccatctttccgcgccggtgagtagcactctctga

SEQ ID NO: 1207 - DNA, 203 bp, Homo sapiens
agatttgacgtgcaactcaaagacctggaaaaatggcagaataatctgcttccatcccgccagtttggtttcattgtactgacaacctcagctggcatcatggaccatgaagaagcaagacgaaaacacacaggagggaaaatcctgggattctttttctagggatgtaatacatatatttacaaataaaatgcctcatggac

SEQ ID NO: 1208 - DNA, 36 bp, Homo sapiens
aatcattgatgaccacagagctgggaaaattgttgt

SEQ ID NO: 1209 - DNA, 246 bp, Homo sapiens
gaacctcacaggcaggctaaacaagtgtggggtgatcagccccagatttgacgtgcaactcaaagacctggaaaaatggcagaataatctgcttccatcccgccagtttggtttcattgtactgacaacctcagctggcatcatggaccatgaagaagcaagacgaaaacacacaggagggaaaatcctgggattctttttctagggatgtaatacatatatttacaaataaaatgcctcatggac

SEQ ID NO: 1210 - DNA, 117 bp, Homo sapiens
ctcagctggcatcatggaccatgaagaagcaagacgaaaacacacaggagggaaaatcctgggattctttttctagggatgtaatacatatatttacaaataaaatgcctcatggac

SEQ ID NO: 1211 - DNA, 102 bp, Homo sapiens
atgtcctggcagatgctctcaagagtatcaacaatgccgaaaagagaggcaaacgccaggtgcttattaggccgtgctccaaagtcatcgtccggtttctca

SEQ ID NO: 1212 - DNA, 130 bp, Homo sapiens
ctcagctggcatcatggaccatgaagaagcaagacgaaaacacacaggagggaaaatcctgggattctttttctagggatgtaatacatatatttacaaataaaatgcctcatggactctggtgcttcca

SEQ ID NO: 1213 - DNA, 36 bp, Homo sapiens
gacaattatgttcctgaggtctcagccttggatcag

SEQ ID NO: 1214 - DNA, 36 bp, Homo sapiens
gaaatgctgaagcttttggacttcggcagtctgtcc

SEQ ID NO: 1215 - DNA, 25 bp, Homo sapiens
gcagtctgtccaaccttcaggtcac

SEQ ID NO: 1216 - DNA, 36 bp, Homo sapiens
gcttgtgctgcagccatgtctctagtgatccctgaa

SEQ ID NO: 1217 - DNA, 36 bp, Homo sapiens
gaactcactgaggatgaggtggaacgtgtgatcacc

SEQ ID NO: 1218 - DNA, 36 bp, Homo sapiens
gctgcgtcacttctggggccttcgtgtccgaggcca

SEQ ID NO: 1219 - DNA, 28 bp, Homo sapiens
ctcttccacaggaggcctacacgccgcc

SEQ ID NO: 1220 - DNA, 70 bp, Homo sapiens
tagccaatggtctggacaacaagctccgtgaagacctggagcgactgaagaagattcgggcccatagagg

SEQ ID NO: 1221 - DNA, 30 bp, Homo sapiens
ctctcttccacaggaggcctacacgccgcc

SEQ ID NO: 1222 - DNA, 36 bp, Homo sapiens
ccgcgcgcaacagccatggcttttaaggataccgga

SEQ ID NO: 1223 - DNA, 36 bp, Homo sapiens
cagatgaacgtggccgaggttgacaaggtcacaggc

SEQ ID NO: 1224 - DNA, 130 bp, Homo sapiens
gcgcagcccagcctcgaaatgcagaacgacgccggcgagttcgtggacctgtacgtgccgcggaaatgctccgctagcaatcgcatcatcggtgccaaggaccacgcatccatccagatgaacgtggccg

SEQ ID NO: 1225 - DNA, 114 bp, Homo sapiens
gcgcagcccagcctcgaaatgcagaacgacgccggcgagttcgtggacctgtacgtgccgcggaaatgctccgctagcaatcgcatcatcggtgccaaggaccacgcatccatc

SEQ ID NO: 1226 - DNA, 28 bp, Homo sapiens
catcggtgccaaggaccacgcatccatc

SEQ ID NO: 1227 - DNA, 127 bp, Homo sapiens
atcttgacgaggctgcggtgtctgctgctattctccgagcttcgcaatgccgcctaaggacgacaagaagaagaaggacgctggaaagtcggccaagaaagacaaagacccagtgaacaaatccggg

SEQ ID NO: 1228 - DNA, 60 bp, Homo sapiens
aagaagaaggacgctggaaagtcggccaagaaagacaaagacccagtgaacaaatccggg

SEQ ID NO: 1229 - DNA, 74 bp, Homo sapiens
ttggctgctccactgtcctctgccagcctacaggaggaaaagcaaggcttacagaaggatgttccttcaggagg

SEQ ID NO: 1230 - DNA, 36 bp, Homo sapiens
cggtctttagccatgcacaaacggtagttttgtgtg

SEQ ID NO: 1231 - DNA, 36 bp, Homo sapiens
aagcagcactaaaagcactctgagtcaagatgagtg

SEQ ID NO: 1232 - DNA, 68 bp, Homo sapiens
cttttcgatccgccatctgcggtggagccgccaccaaaatgcagattttcgtgaaaacccttacgggg

SEQ ID NO: 1233 - DNA, 123 bp, Homo sapiens
cttttcgatccgccatctgcggtggagccgccaccaaaatgcagattttcgtgaaaacccttacggggaagaccatcaccctcgaggttgaaccctcggatacgatagaaaatgtaaaggcca

SEQ ID NO: 1234 - DNA, 174 bp, Homo sapiens
cttttacctcgttgcactgctgagagcaagatgggtcaccagcagctgtactggagccacccgcgaaaattcggccagggttctcgctcttgtcgtgtctgttcaaaccggcacggtctgatccggaaatatggcctcaatatgtgccgccagtgtttccgtcagtacgcgaag

SEQ ID NO: 1235 - DNA, 54 bp, Homo sapiens
tgagagcaagatgggtcaccagcagctgtactggagccacccgcgaaaattcgg

SEQ ID NO: 1236 - DNA, 82 bp, Homo sapiens
gcacggtctgatccggaaatatggcctcaatatgtgccgccagtgtttccgtcagtacgcgaaggatatcggtttcattaag

SEQ ID NO: 1237 - DNA, 72 bp, Homo sapiens
gctgagagcaagatgggtcaccagcagctgtactggagccacccgcgaaaattcggccagggttctcgctct

SEQ ID NO: 1238 - DNA, 339 bp, Homo sapiens
gtcttgatgcagaactttattatgtgagaaatgaccttattagtcactacgctctatcctttagtctgttagtacccagtgagacaaatttcctgcacttcacctggcatgcgaagtccaaggttgaatataagctgggattccaagtggacaatgttttggcaatggatatgccccaggtcaacatttctgttcagggggaagttccacgcactttatcagtgtttcgggtagagctttcctgtactggcaaagtagattctgaagttatgatactaatgcagctcaacttgacagtaaattcttcaaaaaattttaccgtcttaaattttaaacgaa

SEQ ID NO: 1239 - DNA, 143 bp, Homo sapiens
gtggggcaagtccgtgggcatcatgttgaccgagctggagaaagccttgaactctatcatcgacgtctaccacaagtactccctgataaaggggaatttccatgccgtctacagggatgacctgaagaaattgctagagaccg

SEQ ID NO: 1240 - DNA, 357 bp, Homo sapiens
catcatgttgaccgagctggagaaagccttgaactctatcatcgacgtctaccacaagtactccctgataaaggggaatttccatgccgtctacagggatgacctgaagaaattgctagagaccgagtgtcctcagtatatcaggaaaaagggtgcagacgtctggttcaaagagttggatatcaacactgatggtgcagttaacttccaggagttcctcattctggtgataaagatgggcgtggcagcccacaaaaaaagccatgaagaaagccacaaagagtagctgagttactgggcccagaggctgggcccctggacatgtacctgcagaataataaagtcatcaatacctca

SEQ ID NO: 1241 - DNA, 25 bp, Homo sapiens
atgtctcttgtcagctgtctttcag

SEQ ID NO: 1242 - DNA, 25 bp, Homo sapiens
gtctcttgtcagctgtctttcagaa

SEQ ID NO: 1243 - DNA, 185 bp, Homo sapiens
catcatgttgaccgagctggagaaagccttgaactctatcatcgacgtctaccacaagtactccctgataaaggggaatttccatgccgtctacagggatgacctgaagaaattgctagagaccgagtgtcctcagtatatcaggaaaaagggtgcagacgtctggttcaaagagttggatatca

SEQ ID NO: 1244 - DNA, 127 bp, Homo sapiens
catcatgttgaccgagctggagaaagccttgaactctatcatcgacgtctaccacaagtactccctgataaaggggaatttccatgccgtctacagggatgacctgaagaaattgctagagaccgag

SEQ ID NO: 1245 - DNA, 117 bp, Homo sapiens
acagagtgcaagacgatgacttgcaaaatgtcgcagctggaacgcaacatagagaccatcatcaacaccttccaccaatactctgtgaagctggggcacccagacaccctgaaccag

SEQ ID NO: 1246 - DNA, 344 bp, Homo sapiens
aaggtcatagaacacatcatggaggacctggacacaaatgcagacaagcagctgagcttcgaggagttcatcatgctgatggcgaggctaacctgggcctcccacgagaagatgcacgagggtgacgagggccctggccaccaccataagccaggcctcggggagggcaccccctaagaccacagtggccaagatcacagtggccacggccatggccacagtcatggtggccacggccacagccactaatcaggaggccaggccaccctgcctctacccaaccagggccccggggcctgttatgtcaaactgtcttggctgtggggctaggggctggggccaaa

SEQ ID NO: 1247 - DNA, 124 bp, Homo sapiens
aggcctcggggagggcaccccctaagaccacagtggccaagatcacagtggccacggccatggccacagtcatggtggccacggccacagccactaatcaggaggccaggccaccctgcctcta

SEQ ID NO: 1248 - DNA, 298 bp, Homo sapiens
cagagtgcaagacgatgacttgcaaaatgtcgcagctggaacgcaacatagagaccatcatcaacaccttccaccaatactctgtgaagctggggcacccagacaccctgaaccagggggaattcaaagagctggtgcgaaaagatctgcaaaattttctcaagaaggagaataagaatgaaaaggtcatagaacacatcatggaggacctggacacaaatgcagacaagcagctgagcttcgaggagttcatcatgctgatggcgaggctaacctgggcctcccacgagaagatgca

SEQ ID NO: 1249 - DNA, 130 bp, Homo sapiens
gacttgcaaaatgtcgcagctggaacgcaacatagagaccatcatcaacaccttccaccaatactctgtgaagctggggcacccagacaccctgaaccagggggaattcaaagagctggtgcgaaaagat

SEQ ID NO: 1250 - DNA, 25 bp, Homo sapiens
aaacactctgtgtggctcctcggct

SEQ ID NO: 1251 - DNA, 362 bp, Homo sapiens
aaggtcatagaacacatcatggaggacctggacacaaatgcagacaagcagctgagcttcgaggagttcatcatgctgatggcgaggctaacctgggcctcccacgagaagatgcacgagggtgacgagggccctggccaccaccataagccaggcctcggggagggcaccccctaagaccacagtggccaagatcacagtggccacggccatggccacagtcatggtggccacggccacagccactaatcaggaggccaggccaccctgcctctacccaaccagggccccggggcctgttatgtcaaactgtcttggctgtggggctaggggctggggccaaataaagtctcttcctccaa

SEQ ID NO: 1252 - DNA, 122 bp, Homo sapiens
ccatgacggaactagagacagccatgggcatgatcatagacgtcttttcccgatattcgggcagcgagggcagcacgcagaccctgaccaagggggagctcaaggtgctgatggagaaggag

SEQ ID NO: 1253 - DNA, 36 bp, Homo sapiens
gctccgccgcccgagcaggtgccactatgcacgtga

SEQ ID NO: 1254 - DNA, 36 bp, Homo sapiens
catgaccattcgtgacaggtaagctgttactaaaca

SEQ ID NO: 1255 - DNA, 500 bp, Homo sapiens
ggctgctacctcctggcctaaatgaaagtgacgctgagtcaaactcggaagatgaagctacgttggagaactctggacttaacttacaggaagataaagaggatgagagcatcagaaaaacagaaatcatagatttctcaacagatgaaccaaaaactgaaacagagtcaaatgtaaatgcctatgaagagtgtccttctggaattcccatagatatgtggaataaatttcaagaattgcataaaaaacattctgaacagaaaagcacaacctcaagattcagagggaaaagaagaaaacgctccagaaaagataaattgaagaatgaaaaagaattacatagtgaaccgtcctcaaatgaaacccagtggaaagagcttactcagtattttggagtcaatgatagatttgacccgcctgttaaaaggaaaaaagttgagaagtcaggccttgaaaagaggatagaccaggctgtggaggagtggaatattgagaaggct

SEQ ID NO: 1256 - DNA, 462 bp, Homo sapiens
gtcctaagatggctgctgggcgaccacttcctgacagctccagttaacgggactgccagcaggctagacatccttcgccggaatgtgcagcgcttagttctgtgcccgggaggggcttctctctcttttgggattggagtgtggcattgccgccagaaagcctgcagaattccgggttgtgcagccaagcaggaacggtgtacctttctagacccatcctcttgcaatcttggaccctaagaaaagatgtggagtgggctgctacctcctggcctaaatgaaagtgacgctgagtcaaactcggaagatgaagctacgttggagaactctggacttaacttacaggaagataaagaggatgagagcatcagaaaaacagaaatcatagatttctcaacagatgaaccaaaaactgaaacagagtcaaatgtaaatgcctatgaagagtgtccttctggaatt

SEQ ID NO: 1257 - DNA, 500 bp, Homo sapiens
aatgtgcagcgcttagttctgtgcccgggaggggcttctctctcttttgggattggagtgtggcattgccgccagaaagcctgcagaattccgggttgtgcagccaagcaggaacggtgtacctttctagacccatcctcttgcaatcttggaccctaagaaaagatgtggagtgggctgctacctcctggcctaaatgaaagtgacgctgagtcaaactcggaagatgaagctacgttggagaactctggacttaacttacaggaagataaagaggatgagagcatcagaaaaacagaaatcatagatttctcaacagatgaaccaaaaactgaaacagagtcaaatgtaaatgcctatgaagagtgtccttctggaattcccatagatatgtggaataaatttcaagaattgcataaaaaacattctgaacagaaaagcacaacctcaagattcagagggaaaagaagaaaacgctccagaaaagataaattgaagaa

SEQ ID NO: 1258 - DNA, 36 bp, Homo sapiens
acaacgaattatggcaaggtgagagccaagcccctg

SEQ ID NO: 1259 - DNA, 46 bp, Homo sapiens
cagagcacccagagggacttatggaacatcttcaagttgtgggggt

SEQ ID NO: 1260 - DNA, 36 bp, Homo sapiens
gtggacagagctcatcaagtggcataacaagctgtt

SEQ ID NO: 1261 - DNA, 25 bp, Homo sapiens
gatggagagaatgcccacccatata

SEQ ID NO: 1262 - DNA, 94 bp, Homo sapiens
aatgcccacccatatagaaacagtgaccctgtgattgggacccacacagagaaggtgtccctcaaagccagtgactccatggatagtctctaca

SEQ ID NO: 1263 - DNA, 500 bp, Homo sapiens
atcaaaaaccaaagcgaagcagcagttttgggaatttcgatcgttttcggaataattctttatcaaaaccagatgattcaactgaggcacatgaaggagatcccacaaatggaagtggagaacaaagtaaaacttcaaataatggaggcggtttgggtaaaaaaatgagagctatttcatggacaatgaagaaaaaagtgggtaaaaagtacatcaaagccctttctgaggaaaaggatgaggaagatggagagaatgcccacccatatagaaacagtgaccctgtgattgggacccacacagagaaggtgtccctcaaagccagtgactccatggatagtctctacagtggacagagctcatcaagtggcataacaagctgttcagatggtacaagtaaccgggacagctttcgactggatgacgatggcccctattcaggaccattctgtggccgtgccagagtgcatacggatttcacgccaagtccctatgacact

SEQ ID NO: 1264 - DNA, 27 bp, Homo sapiens
gtcaatggcagaaaaaaacacctgaaa

SEQ ID NO: 1265 - DNA, 37 bp, Homo sapiens
caagtaaaatgtttaaccgctgaactcagtcaatggc

SEQ ID NO: 1266 - DNA, 36 bp, Homo sapiens; identical to SEQ ID NO: 444

SEQ ID NO: 1267 - DNA, 500 bp, Homo sapiens
cattctgaatcattctaagcctctggagagactgtaatgatccattcatgagctggtatgaaatcagtgggaagcagaacaacagaaggaactttaaaagcaacaagcaattatgtaccatatatacactgtagcaaatattttatatttgagagtctttacagcttacatttccattccattattacaagtgatgaaaaacaaaaaattgcaagtagtatgcaaattataaatatacagtcttcccacttcactaaccaaattcctactttccagtgttacttcccaatttatgcaggaaacctcctgcaaagctgaaactgattagaaaattctttatattttaaaatagctctttctcatttttagagaagtcaaatagccaaccatcaaaattaagaataaattgaattgtcacagtccattacagttattgttgctagatccacctcatttgcagatgtccaaacttaaattcatctgttcttaaaatgctactt

SEQ ID NO: 1268 - DNA, 44 bp, Homo sapiens
atgagaaaacaagcagtttcagatttacgaacattgaaaactga

SEQ ID NO: 1269 - DNA, 207 bp, Homo sapiens
atggaggaggttttaacaaaacttcgagaagatttggaactctactataaaaaactgctcatgcaacttgaagccagggagatcaagatgagaccaaagaatctggcaaacatcacagactccaagaattacctaataatccagatcactgaggtacagcatgcaattgaccagcttaagagaaaactagatactgacaaaatgaaa

SEQ ID NO: 1270 - DNA, 500 bp, Homo sapiens
aagtttacagaaaaggaagtgcaggaacatttcacaaatctacaatctgtgagtatcacatcctgtatagctgtaaacactggaataaggaagggctgatgactttcagaagatgaaggtaagtagaaaccgttgatgggactgagaaaccagagttaaaacctctttggagcttctgaggactcagctggaaccaacgggcacagttggcaacaccatcatgacatcacaacctgttcccaatgagaccatcatagtgctcccatcaaatgtcatcaacttctcccaagcagagaaacccgaacccaccaaccaggggcaggatagcctgaagaaacatctacacgcagaaatcaaagttattgggactatccagatcttgtgtggcatgatggtattgagcttggggatcattttggcatctgcttccttctctccaaattttacccaagtgacttctacactgttgaactctgcttacccattcataggaccctttt

SEQ ID NO: 1271 - DNA, 143 bp, Homo sapiens
catcacaacctgttcccaatgagaccatcatagtgctcccatcaaatgtcatcaacttctcccaagcagagaaacccgaacccaccaaccaggggcaggatagcctgaagaaacatctacacgcagaaatcaaagttattggg

SEQ ID NO: 1272 - DNA, 517 bp, Homo sapiens
ctaggaggtgtcacaatgtagggtaccaagggttggattgtgatggggcatggtcgtacactgctcattgtgccacaggtgtgactggaaagcatgatattctagggttggtttgtagattcaaataatccagaaatatacctaataagattgagtgaaaaatttgagtcaaatatctagggcattcacagagtagctgtgagttcttggtaatgtgaaaaaggccttgtttttcagaaattcctgggtttcctgttaaaaaatcttaaagcccaaccttaggaatatagtgccccaaaaggcggatgcttcttccattatcttattttctttgatactttatttaattagatgtttataaagaaatgggtttatttttccagcataaacctcagaatttaaggaaagaaaatgatgtctgttgttatagttcattgttttgcctactcagcagaagtgatgactcttaaaaattggctttgaccaaagttctcttgttttcagggaaagaacataa

SEQ ID NO: 1273 - DNA, 500 bp, Homo sapiens
atcctgatgtggctgttactgttcgaaagctggtaattgtttctctgatggagttatttaaagatattactccttcatataaaatccggcccctcacagaagcagaaaaatctactaagacccgaaaagaaacccagaagttaagagaatttgaagaaggcctggttagccaatacaagttttatttggaaaatctggaacaaatggttaaagattggaagcagaggaagctgaagaaaagtaatgtagtttccttaaaggcatacaaaggactggcagaagtcgctgtgaagagcttgtgtgagctgttggtggcactacctcattttaactttcacaacaacatcatcgtattgattgtccctctcatgaatgacatgtcaaaattgatatctgaaatgtgttgtgaagctgtgaagaaactctttaagcaagataaattaggccaagcttctcttggtgtaattaaagtgatttctggttttgtgaagggcagaaat

SEQ ID NO: 1274 - DNA, 500 bp, Homo sapiens
tttcttctagtgagcctgttcatgcgaagaaacggaagcatgaacgcattatagataaatatgaaaaaataccaagaactctgcaaactgcaccagagaaggaactgattcatttacttcctatcaaagataaaagtggtataatcccacagactagggagaagccagttactgatagtaacaaagatgaagaggatcaagaagaagagagggaacttgaggaagagatcattgaagatcctattcaagagctgaccatagaagaacatttgattgagagaaagaagaaattacaggagaagaagatgcatattgcagccttggcatctgccatattatcagatccagaaaataatattaaaaaattgaaagaattacgttctatgttgatggaacaagatcctgatgtggctgttactgttcgaaagctggtaattgtttctctgatggagttatttaaagatattactccttcatataaaatccggcccctcacagaa

SEQ ID NO: 1275 - DNA, 36 bp, Homo sapiens
ggatgtctcgtatctcagatgacagtcgaactgcaa

SEQ ID NO: 1276 - DNA, 36 bp, Homo sapiens
gatattaagagagtggaagaaatgagtggcttatac

SEQ ID NO: 1277 - DNA, 500 bp, Homo sapiens
tctcctgtcagtgaggatagcacagtgcctcaatttgaagctccttctccatcacacagtagtattattgattccacagaatacagccaacctccaggtttcagtggcagttctcagacaaagaaacagccttggtataatagcacgttagcatcaagacgaaaacgacttactgctcattttgaagacttggagcagtgttacttttctacaaggatgtctcgtatctcagatgacagtcgaactgcaagccagttggatgaatttcaggaatgcttgtccaagtttactcgatataattcagtacgacctttagccacattgtcatatgctagtgatctctataatggttccagtatagtctctagtattgaatttgaccgggattgtgactattttgcgattgctggagttacaaagaagattaaagtctatgaatatgacactgtcatccaggatgcagtggatattcattaccctgagaatgaaatgacctgcaa

SEQ ID NO: 1278 - DNA, 500 bp, Homo sapiens
tataatagcacgttagcatcaagacgaaaacgacttactgctcattttgaagacttggagcagtgttacttttctacaaggatgtctcgtatctcagatgacagtcgaactgcaagccagttggatgaatttcaggaatgcttgtccaagtttactcgatataattcagtacgacctttagccacattgtcatatgctagtgatctctataatggttccagtatagtctctagtattgaatttgaccgggattgtgactattttgcgattgctggagttacaaagaagattaaagtctatgaatatgacactgtcatccaggatgcagtggatattcattaccctgagaatgaaatgacctgcaattcgaaaatcagctgtatcagttggagtagttaccataagaacctgttagctagcagtgattatgaaggcactgttattttatgggatggattcacaggacagaggtcaaaggtctatcaggagcatgagaagag

SEQ ID NO: 1279 - DNA, 177 bp, Homo sapiens
aaggagctaagtgttttggaagaggatattaagagagtggaagaaatgagtggcttatactctcctgtcagtgaggatagcacagtgcctcaatttgaagctccttctccatcacacagtagtattattgattccacagaatacagccaacctccaggtttcagtggcagttctcag

SEQ ID NO: 1280 - DNA, 500 bp, Homo sapiens
gtggcagttctcagacaaagaaacagccttggtataatagcacgttagcatcaagacgaaaacgacttactgctcattttgaagacttggagcagtgttacttttctacaaggatgtctcgtatctcagatgacagtcgaactgcaagccagttggatgaatttcaggaatgcttgtccaagtttactcgatataattcagtacgacctttagccacattgtcatatgctagtgatctctataatggttccagtatagtctctagtattgaatttgaccgggattgtgactattttgcgattgctggagttacaaagaagattaaagtctatgaatatgacactgtcatccaggatgcagtggatattcattaccctgagaatgaaatgacctgcaattcgaaaatcagctgtatcagttggagtagttaccataagaacctgttagctagcagtgattatgaaggcactgttattttatgggatggattcacaggacag

SEQ ID NO: 1281 - DNA, 291 bp, Homo sapiens
caccttcatcaaactgggaggtggaaaagttgagctgtgacctgaagatccatggtttggaacaagagctggaactgatgaggaaagaatgtagcgatctcaaaatagaactacagaaagccaaacaaacggatccatatcaggaagacaatctgaagagcagagatctccaaaaactaagcatttcaagtgataatatgcagcatgcatactgggaactgaagagagaaatgtctaatttacatctggtgactcaagtacaagctgaactactaagaaaactgaaaacct

SEQ ID NO: 1282 - DNA, 393 bp, Homo sapiens
gcagtgaagaccttggaagagacagcacaaaactgcacttgatgaattttactgcaacatacacaagacatccccctctcttaccaaatggcaaagctctttgtcataccacatcttcccctttaccaggagatgtaaaggttttatcagagaaagcaatcctccaatcatggacagacaatgagagatccattcctaatgatggtacatgctttcaggaacacagttcttatggcagaaattctctggaagacaattcctgggtatttccaagtcctcctaaatcaagtgagacagcatttggggaaactaaaactaaaactttgcctttacccaaccttccaccactgcattacttggatcaacataatcagaactgcctttataagaatt

SEQ ID NO: 1283 - DNA, 27 bp, Homo sapiens
agacaatctgaagagcagagatctcca

SEQ ID NO: 1284 - DNA, 190 bp, Homo sapiens
caccttcatcaaactgggaggtggaaaagttgagctgtgacctgaagatccatggtttggaacaagagctggaactgatgaggaaagaatgtagcgatctcaaaatagaactacagaaagccaaacaaacggatccatatcaggaagacaatctgaagagcagagatctccaaaaactaagcatttcaag

SEQ ID NO: 1285 - DNA, 500 bp, Homo sapiens
gaagaaacaagttccgtgggacgagaacaagtaaataaggcctatcatgcatatcgagaggtttgcattgatagagataatttgaagagcaaactggacaaaatgaataaagacaactctgaatctttgaaagtattgaatgagcagctacaatctaaagaagtagaactcctccagctgaggacagaggtggaaactcagcaggtgatgaggaatttaaatccaccttcatcaaactgggaggtggaaaagttgagctgtgacctgaagatccatggtttggaacaagagctggaactgatgaggaaagaatgtagcgatctcaaaatagaactacagaaagccaaacaaacggatccatatcaggaagacaatctgaagagcagagatctccaaaaactaagcatttcaagtgataatatgcagcatgcatactgggaactgaagagagaaatgtctaatttacatctggtgactcaagtacaagctgaactactaag

SEQ ID NO: 1286 - DNA, 113 bp, Homo sapiens
caccttcatcaaactgggaggtggaaaagttgagctgtgacctgaagatccatggtttggaacaagagctggaactgatgaggaaagaatgtagcgatctcaaaatagaacta

SEQ ID NO: 1287 - DNA, 500 bp, Homo sapiens
gcatatgaagacatcaaaaaacgacttaaggattcagagaaagagaactctttgttaaagaagagaataagatttttggaagaaaagctaatagctcgatttgaagaagaaacaagttccgtgggacgagaacaagtaaataaggcctatcatgcatatcgagaggtttgcattgatagagataatttgaagagcaaactggacaaaatgaataaagacaactctgaatctttgaaagtattgaatgagcagctacaatctaaagaagtagaactcctccagctgaggacagaggtggaaactcagcaggtgatgaggaatttaaatccaccttcatcaaactgggaggtggaaaagttgagctgtgacctgaagatccatggtttggaacaagagctggaactgatgaggaaagaatgtagcgatctcaaaatagaactacagaaagccaaacaaacggatccatatcaggaagacaatctgaagagcagagatctcca

SEQ ID NO: 1288 - DNA, 36 bp, Homo sapiens
tttttttttctgcctaagtctcatgatcgattacaa

SEQ ID NO: 1289 - DNA, 36 bp, Homo sapiens
gaaacaataacagatctggtgagtgtgccatgccag

SEQ ID NO: 1290 - DNA, 500 bp, Homo sapiens
agtgaaatggggtgaatcatttgacaaactgctttcccatagagatggactagaggcttttaccagatttcttaaaactgaattcagtgaagaaaatattgaattttggatagcctgtgaagatttcaagaaaagcaagggacctcaacaaattcaccttaaagcaaaagcaatatatgagaaatttatacagactgatgccccaaaagaggttaaccttgattttcacacaaaagaagtcattacaaacagcatcactcaacctaccctccacagttttgatgctgcacaaagcagagtgtatcagctcatggaacaagacagttatacacgttttctgaaatctgacatctatttagacttgatggaaggaagacctcagagaccaacaaatcttaggagacgatcacgctcatttacctgcaatgaattccaagatgtacaatcagatgttgccatttggttataaagaaaattgattttgctcatttttatgacaa

SEQ ID NO: 1291 - DNA, 500 bp, Homo sapiens
acaaaagaagtcattacaaacagcatcactcaacctaccctccacagttttgatgctgcacaaagcagagtgtatcagctcatggaacaagacagttatacacgttttctgaaatctgacatctatttagacttgatggaaggaagacctcagagaccaacaaatcttaggagacgatcacgctcatttacctgcaatgaattccaagatgtacaatcagatgttgccatttggttataaagaaaattgattttgctcatttttatgacaaacttatacatctgcttctaacatatcgcatgtttatgttaagatttggtcccatcctttaaactgaaatatgtcatgtgaaattattttaaaaatgtaaaaacaaaactttctgctaacaaaatacatacagtatctgccagtatattctgtaaaaccttctatttgatgtcattccatttataatcagaaaaaaaacttatttcttaatcaaaaggcagtacaaaaaa

SEQ ID NO: 1292 - DNA, 500 bp, Homo sapiens
ctatcatgaccagaaagttgcggaggcgaccaaatgatcccgtccccatcccagacaagaggaggaaacctgctccagcccagctaaactatttgttaacagatgaacagatcatggaggatctgagaacattaaataagcttaagtcacccaagagaccagcatctccatcctctcctgagcacttgcctgcaacacccgcggaatctccagcccagaggttcgaagctcggatagaagatggcaaactgtactatgacaaaagatggtaccacaagagccaggccatctatctggagtcaaaggacaaccagaaactgagctgcgtgatcagttctgtaggagccaatgagatctgggtgaggaagacaagtgacagcaccaagatgaggatctacctgggccagcttcagcgcgggctcttcgtgatccgccggcgctcagctgcttgactttctacagtgctcttctcttgaccctttttctggagtgggttttat

SEQ ID NO: 1293 - DNA, 36 bp, Homo sapiens
tgttgtgctgcctgaaaaccctattacttatgcctg

SEQ ID NO: 1294 - DNA, 36 bp, Homo sapiens
cagccatgaaaatgtgtcggttattcctaattgtca

SEQ ID NO: 1295 - DNA, 46 bp, Homo sapiens
actcagaagttcgatgtcttactccaacagattatgatgtttctgt

SEQ ID NO: 1296 - DNA, 406 bp, Homo sapiens
tgcatcgccaaccaagttcagctcttctacgctactgatcggaaagagacctacgggttagtggagacctttaacctcagaccaaatgagttcaaatatatgtctgtcatcgctgaattggagcaaagcggacttggagcagaactgaaatgtgcccagaaccaaaataagacttagaactgtacaggttggcccttcacctagttgactcagccctcgatagtctagagcccaccccctcctcaggaactcaagagctcagcatttataatgagcagttggtaatgagttgccctatgtgcttgtcgcaagcagtcacagagatgagccctattacttgatattcaggaacaaaggtacctgaacattctgataattatctcagcatacttgaggtttccttttt

SEQ ID NO: 1297 - DNA, 285 bp, Homo sapiens
gccagccagctgattttatatcactatcctgaacttaaggaagaaaagggcatagtgctgatgactgcagaaatggattccacatttctgaatgttgctgaggcacagtgcatcgccaaccaagttcagctcttctacgctactgatcggaaagagacctacgggttagtggagacctttaacctcagaccaaatgagttcaaatatatgtctgtcatcgctgaattggagcaaagcggacttggagcagaactgaaatgtgcccagaaccaaaataagacttag

SEQ ID NO: 1298 - DNA, 500 bp, Homo sapiens
gccagccagctgattttatatcactatcctgaacttaaggaagaaaagggcatagtgctgatgactgcagaaatggattccacatttctgaatgttgctgaggcacagtgcatcgccaaccaagttcagctcttctacgctactgatcggaaagagacctacgggttagtggagacctttaacctcagaccaaatgagttcaaatatatgtctgtcatcgctgaattggagcaaagcggacttggagcagaactgaaatgtgcccagaaccaaaataagacttagaactgtacaggttggcccttcacctagttgactcagccctcgatagtctagagcccaccccctcctcaggaactcaagagctcagcatttataatgagcagttggtaatgagttgccctatgtgcttgtcgcaagcagtcacagagatgagccctattacttgatattcaggaacaaaggtacctgaacattctgataattatctcagcatactt

SEQ ID NO: 1299 - DNA, 500 bp, Homo sapiens
cttattggtgacgtggaactgaaaagggtgatggcttgttccagatgcattttaaccacagtggacccagacaccggtgtcatgagcaggaaggaaccgctggaaacactgaagagttatcgccagtgtgacccttcagaacgaaagttatatggaaaatcaccactctttgggcagtattttgtgctggaaaacccagggaccatcaaagtgggagaccctgtgtacctgctgggccagtaatgggaaccgtatgtcctggaatattagatgccttttaaaaatgttctcaaaaatgacaacacttgaagcatggtgtttcagaactgagacctctacattttctttaaatttgtgattttcacatttttcgtcttttggacttctggtgtctcaatgcttcaatgtcccagtgcaaaaagtaaagaaatatagtctcaataacttagtaggacttcagtaagtcacttaaatgacaagacaggattctgaaaactccc

SEQ ID NO: 1300 - DNA, 500 bp, Homo sapiens
agcccattcttgatcctttctgaggcgtcgctggcggatctcaactccaggctagagaagaaagttaaagcaaccaacttcaggcccaatattgtaatttcaggatgcgatgtctatgcagaggattcttgggatgagcttcttattggtgacgtggaactgaaaagggtgatggcttgttccagatgcattttaaccacagtggacccagacaccggtgtcatgagcaggaaggaaccgctggaaacactgaagagttatcgccagtgtgacccttcagaacgaaagttatatggaaaatcaccactctttgggcagtattttgtgctggaaaacccagggaccatcaaagtgggagaccctgtgtacctgctgggccagtaatgggaaccgtatgtcctggaatattagatgccttttaaaaatgttctcaaaaatgacaacacttgaagcatggtgtttcagaactgagacctctacattttctttaaatttgtgat

SEQ ID NO: 1301 - DNA, 36 bp, Homo sapiens
ggacccagacaccggtgtcatgagcaggaaggaacc

SEQ ID NO: 1302 - DNA, 36 bp, Homo sapiens
tatgtatgctttcttcagggacttagtcatgcattg

SEQ ID NO: 1303 - DNA, 500 bp, Homo sapiens
cctgttgttcaaaggagagaaccggtatcactggaagaatggactaagaacattgattctgaaggaagaattttaaatgtagataatatgaagcagatgatatttagagggggacttagtcatgcattgagaaagcaagcatggaaatttcttctgggttattttccctgggacagtaccaaggaggaaagaacccaattacaaaagcaaaaaactgatgaatacttcagaatgaaactgcagtggaaatccatcagccaggaacaagagaaaagaaattcgaggttaagagattatagaagtcttatcgaaaaagatgttaacagaacagatcgaacaaacaagttttatgaaggccaagataatccagggttgattttacttcatgacattttgatgacctactgtatgtatgattttgatttaggatatgttcaaggaatgagtgatttactttcccctcttttatatgtgatggaaaatgaagtggatgccttttg

SEQ ID NO: 1304 - DNA, 500 bp, Homo sapiens
gaaactgcagtggaaatccatcagccaggaacaagagaaaagaaattcgaggttaagagattatagaagtcttatcgaaaaagatgttaacagaacagatcgaacaaacaagttttatgaaggccaagataatccagggttgattttacttcatgacattttgatgacctactgtatgtatgattttgatttaggatatgttcaaggaatgagtgatttactttcccctcttttatatgtgatggaaaatgaagtggatgccttttggtgctttgcctcttacatggaccaaatgcatcagaattttgaagaacaaatgcaaggcatgaagacccagctaattcagctgagtaccttacttcgattgttagacagtggattttgcagttacttagaatctcaggactctggatacctttatttttgcttcaggtggcttttaatcagattcaaaagggaatttggttttctagatattcttcgattatgggaggtaatgt

SEQ ID NO: 1305 - DNA, 36 bp, Homo sapiens
gtgcatattgtgtttcagtgtgtgatgagcataagg

SEQ ID NO: 1306 - DNA, 46 bp, Homo sapiens
cttgtttgcctagccccagtactccagtgcagtctcctcatccaca

SEQ ID NO: 1307 - DNA, 36 bp, Homo sapiens
acttcaaaaaattggggatctaggtgcggtgcaggc

SEQ ID NO: 1308 - DNA, 297 bp, Homo sapiens
gacgcgtgaccaaaaccaaagacggccatgaagtgagatcgtgcaaagtagcagataaaacgggcagcatcactatttccgtgtgggatgagatcggaggtcttatacagccaggggatattattcggttgaccagagggtatgcatccatgtggaaaggatgtctgacactttatactggaaggggtggtgaacttcaaaaaattggggatctaggtgcggtgcaggcagccgcaatgcgagattccatacactactaccctggtaatgatctccaccctgacctggaggagccat

SEQ ID NO: 1309 - DNA, 36 bp, Homo sapiens
catccagtgagtcagaagattcagcgtttgttggaa

SEQ ID NO: 1310 - DNA, 36 bp, Homo sapiens
aagagaaatcaatccaagacagatgcaccatcagga

SEQ ID NO: 1311 - DNA, 62 bp, Homo sapiens
atggaattacagtcatggtatcctgttataaagcaggaaggtgaccatgtttctcagacaca

SEQ ID NO: 1312 - DNA, 42 bp, Homo sapiens
gtggaactagatggtgtatgatgacctcatgtagcctgaaca

SEQ ID NO: 1313 - DNA, 36 bp, Homo sapiens
cattcgcgtggtgaaggacctcagttcagaagagct

SEQ ID NO: 1314 - DNA, 26 bp, Homo sapiens
gaggctgcccagagtgtccagcacgg

SEQ ID NO: 1315 - DNA, 500 bp, Homo sapiens
ctgagatcgttgtttctagtacagcactgtatccttcagtaacagtttcagcaacttcagcctctgcagggggcagtactgctaccccaggtcctaagcctccagctgtagtatctcagcaggcagcaggcagcactactgtgggagccacattaacatcagtttctaccaccacttcattcccaagcacagcttcacagctgtccattcagcttagcagcagtacttctactcctactttagctgaaaccgtggtagttagcgcacactcactagataagacatctcatagcagtacaactggattggctttctccctctctgcaccatcttcctcttcctctcctggagcaggagtgtctagttatatttctcagcctggtgggctgcatcctttggtcattccatcagtgatagcttctactcctattcttccccaagcagcaggacctacttctacacctttattaccccaagtacctagtatcccacccttggta

SEQ ID NO: 1316 - DNA, 307 bp, Homo sapiens
cggctatgtgcgtttaaagatccgtatcagcaagaccttgggataggtgagagtagaatctctcatgaaaatgggacaatattatgctcgaaaggtagcacctgctatggcctttgggagaaatcaaaaggggacataaatcttgtaaaacaaggatgttggtctcacattggagatccccaagagtgtcactatgaagaatgtgtagtaactaccactcctccctcaattcagaatggaacataccgtttctgctgttgtagcacagatttatgtaatgtcaactttactgagaattttccacctc

SEQ ID NO: 1317 - DNA, 500 bp, Homo sapiens
tctctgcttagtgccacgtgtaacacattcatcacaacgcttgaggaatgtgtgaagatagccaatgccaagtttaaacctgagatgtttcaactgcaccatccggatcccttagtttctcctgtgtcaccttctcctgttcaaatgatgaagcgttctgtcagccaccctggttcttgcagttcagagaggagtagccactctataaaagaaccagtatctacacttcaccgactctcccagcgacgccgaagaacctactcagatacagattcttgtagtgatattcctcttgaagacccagatagacctgttcactgttcaaaaaatacacttaatggagatttggcatcagcaaccattcctgaagaaagcagacttatggccaaaaaacaatctgaatcagaagatactcttccatccttctcttcctgaagaaactgaagtgtccaacttcctctaagtattgctatgcaaaagctgctgtaattaaactattg

SEQ ID NO: 1318 - DNA, 80 bp, Homo sapiens
agaaccagtatctacacttcaccgactctcccagcgacgccgaagaacctactcagatacagattcttgtagtgatattc

SEQ ID NO: 1319 - DNA, 500 bp, Homo sapiens
gtttgtgaaattaaagttcattcagcagacaacacaagaatggaattaatcattcctggagagcagcatttctacatgaaggcagtgaatgcagctgaaagacagaggtggctggtcgctctggggagctccaaagcatgtttgactgatacaaggactaaaaaagaaaaagaaataagtgaaaccagtgaatcgctgaaaaccaaaatgtctgaacttcgcctctactgtgacctcttaatgcagcaagttcatacaatacaggaatttgttcaccatgatgagaatcattcatctcctagtgcagagaacatgaatgaagcctcttctctgcttagtgccacgtgtaacacattcatcacaacgcttgaggaatgtgtgaagatagccaatgccaagtttaaacctgagatgtttcaactgcaccatccggatcccttagtttctcctgtgtcaccttctcctgttcaaatgatgaagcgttctgtcagccaccctgg

SEQ ID NO: 1320 - DNA, 36 bp, Homo sapiens
cagcaaaagcggctttgggtatggacttccctaaac

SEQ ID NO: 1321 - DNA, 36 bp, Homo sapiens
tatgccctgttttctcagtttggtcatgtggtggac

SEQ ID NO: 1322 - DNA, 36 bp, Homo sapiens
gagcgtagtgaccatcatgagcctcctcaacaagcc

SEQ ID NO: 1323 - DNA, 25 bp, Homo sapiens
gggagtgaacggagagcgtagtgac

SEQ ID NO: 1324 - DNA, 63 bp, Homo sapiens
aagagtgagatgaccccagaggagctgcagaagcgagaggaggaggaatttaacaccggtcca

SEQ ID NO: 1325 - DNA, 36 bp, Homo sapiens
ctctctgtgctcacacagtcagtcaagaacaatacc

SEQ ID NO: 1326 - DNA, 36 bp, Homo sapiens
gttatggtgcagcccatcaacctcatcttcagatac

SEQ ID NO: 1327 - DNA, 190 bp, Homo sapiens
tctcagcagccaaccagtcaagcccaaattgtgcaaggtattacaccacagacaatccatggtgtgcaagccagtggtcaaaatatatcacaacaggctttgcaaaatcttcagttgcagctgaatcctggaacctttttaattcaggcacagacagtgaccccttctggacaggtaacttggcaaacgt

SEQ ID NO: 1328 - DNA, 390 bp, Homo sapiens
tttattatttttgaacctggagcattttctgttggacgttacaggatcttactgctttaaatcatacattattaaaaaaaatgagggtttattctttgaattacccttttgtatgcaggagtgaagactgcttttttagttgaccattcaaaatcgttgaattttagtttttgcagactactaaaatttgcagtgactttttttttgtaaggggggtaaatgaaacatttagcagcctttgaaatcagcaagttgcttagatagtactttagattttgaaactgaatataacagtgttagaaaagtatgtgtaaggaattgtatttacgtgcatactagtagtacaatacttatagctgaatttggttggcaaaagtatgttttcatttt

SEQ ID NO: 1329 - DNA, 500 bp, Homo sapiens
aacccagatgcttcagtcaagttctcagagtttttaaagaagtgctcagagacatggaagaccatttttgctaaagagaaaggaaaatttgaagatatggcaaaggcggacaaggcccattatgaaagagaaatgaaaacctatatccctcctaaaggggagaaaaaaaagaagttcaaggatcccaatgcacccaagaggcctcctttggcctttttcctgttctgctctgagtatcgcccaaaaatcaaaggagaacatcctggcctgtccattgatgatgttgtgaagaaactggcagggatgtggaataacaccgctgcagctgacaagcagttttatgaaaagaaggctgcaaagctgaaggaaaaatacaaaaaggatattgctgcatatcgagctaaaggaaagcctaattcagcaaaaaagagagttgtcaaggctgaaaaaagcaagaaaaagaaggaagaggaagaagatgaagaggatgaacaagagga

SEQ ID NO: 1330 - DNA, 500 bp, Homo sapiens
tacagagtgaggataaaaagtggttcactcccagggaatttgaaattgaaggagaccgcggagcatccaagaactggaagctaagtatacgctgcggtggatataccctgaaagtcctgatggagaacaaatttctgccagaaccaccaagcacaagaaaaaagagaatactggaatctcacaacaataccttagttgacccttgtgaggagcataagaagaagaacccagatgcttcagtcaagttctcagagtttttaaagaagtgctcagagacatggaagaccatttttgctaaagagaaaggaaaatttgaagatatggcaaaggcggacaaggcccattatgaaagagaaatgaaaacctatatccctcctaaaggggagaaaaaaaagaagttcaaggatcccaatgcacccaagaggcctcctttggcctttttcctgttctgctctgagtatcgcccaaaaatcaaaggagaacatcctggcctgtccatt

SEQ ID NO: 1331 - DNA, 500 bp, Homo sapiens
ccaccaagcacaagaaaaaagagaatactggaatctcacaacaataccttagttgacccttgtgaggagcataagaagaagaacccagatgcttcagtcaagttctcagagtttttaaagaagtgctcagagacatggaagaccatttttgctaaagagaaaggaaaatttgaagatatggcaaaggcggacaaggcccattatgaaagagaaatgaaaacctatatccctcctaaaggggagaaaaaaaagaagttcaaggatcccaatgcacccaagaggcctcctttggcctttttcctgttctgctctgagtatcgcccaaaaatcaaaggagaacatcctggcctgtccattgatgatgttgtgaagaaactggcagggatgtggaataacaccgctgcagctgacaagcagttttatgaaaagaaggctgcaaagctgaaggaaaaatacaaaaaggatattgctgcatatcgagctaaaggaaagcctaattc

SEQ ID NO: 1332 - DNA, 500 bp, Homo sapiens; identical to SEQ ID NO: 1329

SEQ ID NO: 1333 - DNA, 500 bp, Homo sapiens
gtgatctaaatccactccttccacagtaccggattctctctttaaccctccccttcgtgtttcccccaatgtttaaaatgtttggatggtttgttgttctgcctggagacaaggtgctaacatagatttaagtgaatacattaacggtgctaaaaatgaaaattctaacccaagacatgacattcttagctgtaacttaactattaaggccttttccacacgcattaatagtcccatttttctcttgccatttgtagctttgcccattgtcttattggcacatgggtggacacggatctgctgggctctgccttaaacacacattgcagcttcaacttttctctttagtgttctgtttgaaactaatacttaccgagtcagactttgtgttcatttcatttcagggtcttggctgcctgtgggcttccccaggtggcctggaggtgggcaaagggaagtaacagacacacgatgttgtcaaggatggttttgggactaga

SEQ ID NO: 1334 - DNA, 36 bp, Homo sapiens
actagcacaacttgctagaatgactgatggatactc

SEQ ID NO: 1335 - DNA, 76 bp, Homo sapiens
tgatgatatagctggtcaagacttggcaaaacaagcattgcaagaaattgttattcttccttctctgaggcctgag

SEQ ID NO: 1336 - DNA, 94 bp, Homo sapiens
aatgactgatggatactcaggaagtgacctaacagctttggcaaaagatgcagcactgggtcctatccgagaactaaaaccagaacaggtgaag

SEQ ID NO: 1337 - DNA, 500 bp, Homo sapiens
ttggtgagggctctttttgctgtggctcgagaacttcaaccttctataatttttatagatgaagttgatagccttttgtgtgaaagaagagaaggggagcacgatgctagtagacgcctaaaaactgaatttctaatagaatttgatggtgtacagtctgctggagatgacagagtacttgtaatgggtgcaactaataggccacaagagcttgatgaggctgttctcaggcgtttcatcaaacgggtatatgtgtctttaccaaatgaggagacaagactacttttgcttaaaaatctgttatgtaaacaaggaagtccattgacccaaaaagaactagcacaacttgctagaatgactgatggatactcaggaagtgacctaacagctttggcaaaagatgcagcactgggtcctatccgagaactaaaaccagaacaggtgaagaatatgtctgccagtgagatgagaaatattcgattatctgacttcactgaatc

SEQ ID NO: 1338 - DNA, 44 bp, Homo sapiens
aaaaatctgttatgtaaacaaggaagtccattgacccaaaaaga

SEQ ID NO: 1339 - DNA, 500 bp, Homo sapiens
cgggagtttgcccgagacaccgggaacattgggcaggagcgcgtggacacggtcaatcacctggcagatgagctcatcaactctggacattcagatgccgccaccatcgctgaatggaaggatggcctcaatgaagcctgggccgacctcctggagctcattgacacaagaacacagattcttgccgcttcctatgaactgcacaagttttaccacgatgccaaggagatctttgggcgtatacaggacaaacacaagaaactccctgaggagcttgggagagatcagaacacagtggagaccttacagagaatgcacactacatttgagcatgacatccaggctctgggcacacaggtgaggcagctgcaggaggatgcagcccgcctccaggcggcctatgcgggtgacaaggccgacgatatccagaagcgcgagaacgaggtcctggaagcctggaagtccctcctggacgcctgtgagagccgcagggtgcggct

SEQ ID NO: 1340 - DNA, 500 bp, Homo sapiens
ctgatgagaagtccataatcacttatgtggtgacttattaccactacttctctaagatgaaggccttagctgttgaaggaaaacgaattggaaaggtgcttgacaatgctattgaaacagaaaaaatgattgaaaagtatgaatcacttgcctctgaccttctggaatggattgaacaaaccatcatcattctgaacaatcgcaaatttgccaattcactggtcggggttcaacagcagcttcaggcattcaacacttaccgcactgtggagaaaccacccaaatttactgagaaggggaacttggaagtgctgctcttcaccattcagagcaagatgagggccaacaaccagaaggtctacatgccccgggaggggaagctcatctctgacatcaacaaggcctgggaaagactggaaaaagcggaacacgaaagagaactggctttgcggaatgagctcataagacaggagaaactggaacagctcgcccgcagattt

SEQ ID NO: 1341 - DNA, 500 bp, Homo sapiens
acaaagaatggcttgacaaaatcgagaaggaaggaatgcagctcatttcagaaaagcctgagacggaagctgtggtgaaggagaaactcactggtttacataaaatgtgggaagtccttgaatccactacccagacaaaggcccagcggctctttgatgcaaacaaggccgaacttttcacccagagctgtgcagatctagacaaatggctgcacggcctggagagtcagattcagtctgatgactatggcaaacacctgaccagtgtcaatatcctgctgaaaaagcaacagatgctggagaatcagatggaagtgcggaagaaggagatcgaagagctccaaagccaagcccaggccctgagtcaggaagggaagagcaccgacgaggtagacagcaagcgcctcaccgtgcagaccaagttcatggagttgctggagcccttgaacgagaggaagcataacctgctggcctccaaagagatccatcagttcaacagg

SEQ ID NO: 1342 - DNA, 36 bp, Homo sapiens
atatcaccttgaagaagtatgacggtcgaaccaaac

SEQ ID NO: 1343 - DNA, 36 bp, Homo sapiens
aagaagatcagcactgtggtgagctccaaggaagtg

SEQ ID NO: 1344 - DNA, 193 bp, Homo sapiens
gatggtgttgttggagagcgagcagttcctgacggagctgaccagacttttccagaagtgccggacgtcgggcagcgtctatatcaccttgaagaagtatgacggtcgaaccaaacccattccaaagaaaggtactgtggagggctttgagcccgcagacaacaagtgtctgttacgagctaccgatgggaag

SEQ ID NO: 1345 - DNA, 37 bp, Homo sapiens
agacttttccagaagtgccggacgtcgggcagcgtct

SEQ ID NO: 1346 - DNA, 151 bp, Homo sapiens
ccagcctaggccgaacttccggctctcactgctaggggcttaagcggagggagtcgagccagcgtcgccgcgatggtgttgttggagagcgagcagttcctgacggagctgaccagacttttccagaagtgccggacgtcgggcagcgtct

SEQ ID NO: 1347 - DNA, 36 bp, Homo sapiens
tcattatcagaagacactgatgggactgaggaagac

SEQ ID NO: 1348 - DNA, 500 bp, Homo sapiens
aagatgacgtaactgccctgcattgtaaagtggtatgccttatccagaatggaagtttcaaggaagctttgaatgtcatcaatactcacaccaaagtgttagccaataactctctctcctttgaaaaggcatattgcgagtacaggctgaacagaattgagaatgccttgaagacaatagaaagtgccaaccagcagacagacaaactgaaggagctttatggacaagtgttataccgtttggaacgctatgatgaatgcttagcagtgtatagagatctcgtccggaactcccaagatgattatgatgaggagaggaaaacaaacctttcagcagttgttgcagctcaaagcaattgggaaaaagtggttccagagaacctgggcctccaagaaggcacacatgagctgtgctacaacactgcatgtgcactgataggccaaggccagctgaaccaggccatgaaaatcctacaagaagctgaagatctttgccgccgt

SEQ ID NO: 1349 - DNA, 291 bp, Homo sapiens
gaaggcacacatgagctgtgctacaacactgcatgtgcactgataggccaaggccagctgaaccaggccatgaaaatcctacaagaagctgaagatctttgccgccgttcattatcagaagacactgatgggactgaggaagacccacaggcagaactggccatcattcatggtcagatggcttatattctgcagcttcagggtcgaacagaggaggctttgcaactttacaatcaaataataaaactaaaaccaacagatgtgggattactagctgtaattgcaaataac

SEQ ID NO: 1350 - DNA, 500 bp, Homo sapiens
aaggcatattgcgagtacaggctgaacagaattgagaatgccttgaagacaatagaaagtgccaaccagcagacagacaaactgaaggagctttatggacaagtgttataccgtttggaacgctatgatgaatgcttagcagtgtatagagatctcgtccggaactcccaagatgattatgatgaggagaggaaaacaaacctttcagcagttgttgcagctcaaagcaattgggaaaaagtggttccagagaacctgggcctccaagaaggcacacatgagctgtgctacaacactgcatgtgcactgataggccaaggccagctgaaccaggccatgaaaatcctacaagaagctgaagatctttgccgccgttcattatcagaagacactgatgggactgaggaagacccacaggcagaactggccatcattcatggtcagatggcttatattctgcagcttcagggtcgaacagaggaggctttgcaactttacaa

SEQ ID NO: 1351 - DNA, 500 bp, Homo sapiens
ccagaaaatgcagctgaaattaagctgaccatggcacagttgaaaatttctcaaggtaatatttctaaagcatgtctaatattgagaagcatagaggagttaaagcataaaccaggcatggtatctgcattagttaccatgtatagccatgaagaagatattgatagtgccattgaggtcttcacacaagctatccagtggtatcaaaaccatcagccaaaatctcctgctcatttgtccttgataagagaagctgcaaacttcaaactcaaatatgggcggaagaaggaggcaattagtgacctacaacagctgtggaaacaaaatccaaaagatattcacaccctggcacagcttatttctgcttactcacttgtagatccagagaaagccaaagctcttagtaaacacttgccatcgtcagatagtatgtctctaaaagtagatgttgaggctcttgaaaattctgctggtgctacatacattcggaagaagggtgg

SEQ ID NO: 1352 - DNA, 500 bp, Homo sapiens
gtctaatattgagaagcatagaggagttaaagcataaaccaggcatggtatctgcattagttaccatgtatagccatgaagaagatattgatagtgccattgaggtcttcacacaagctatccagtggtatcaaaaccatcagccaaaatctcctgctcatttgtccttgataagagaagctgcaaacttcaaactcaaatatgggcggaagaaggaggcaattagtgacctacaacagctgtggaaacaaaatccaaaagatattcacaccctggcacagcttatttctgcttactcacttgtagatccagagaaagccaaagctcttagtaaacacttgccatcgtcagatagtatgtctctaaaagtagatgttgaggctcttgaaaattctgctggtgctacatacattcggaagaagggtggaaaagttactggagatagtcaaccaaaggaacaaggacagggagatttgaaaaagaagaaaaagaaaaagaag

SEQ ID NO: 1353 - DNA, 68 bp, Homo sapiens
ttgtccttgataagagaagctgcaaacttcaaactcaaatatgggcggaagaaggaggcaattagtga

SEQ ID NO: 1354 - DNA, 285 bp, Homo sapiens
aaaatggaggaatctgtaaaccaaatgcagccactgaatgagaagcagatagccaattctcaggatggatatgtatggcaagtcactgacatgaatcgactacaccggttcttatgtttcggttctgaaggtgggacttattatatcaaagaacagaagttgggccttgaaaatgctgaagctttaattagattgattgaagatggcagaggatgtgaagtgatacaagaaataaagtcatttagtcaagaaggcagaaccacaaagcaagagcctatgctcttt

SEQ ID NO: 1355 - DNA, 36 bp, Homo sapiens
tattgtttcttttggtaggccgttttcgtcaaattg

SEQ ID NO: 1356 - DNA, 500 bp, Homo sapiens
actggatgaacaaagcagtagtacactcaagggtgtgcttgtgagaaatggaggaagttttgaagatgatttgtcattgggagctgaagccaaccacctccatgaaagtgatgctcaaattgaaaactgcaataatatcttggccaaagagagaagattacagtttcatcagaaagggagaagtatgaattccactggatctgggaaaagtagtgggacagtttcaagtgtttcagaattgttggaactttatgaggaagatcctgaagaaattctttataatcttggatttggacgtgatgaaccagatattgcttctaaaattccttccagattttttaattcatcatcctttgccaaagggatagatattaaagtatttttgagtgctcagatgcaacggatggaagtagaaaacccaaattatgctttaacaagccgttttcgtcaaattgaagtgcttactactgtggccaatgcgttttcttctttatattctc

SEQ ID NO: 1357 - DNA, 26 bp, Homo sapiens
agcctcactggatgaacaaagcagta

SEQ ID NO: 1358 - DNA, 507 bp, Homo sapiens
cctggacagggaggaatcctggctcagcgggagtttgacaggcgattctcccctcattttctggactgggcagcctttggggtcatgacccttccctccatcggcatccccctgctattgtggtactccagcaagaggaaatatgacactcccaaaacgaagaagaactgattggggcttccacagccctcctctcccaagaaatccaggctcctctcccaagaaatccaggtgctttccagactccaaagggtatcttaaatgcaatctcttctctcttagcccttggccactttctcctggatcctgccctgctctcagccatagtgaaggaccagccctaggagtctgcgagagcctccttggttccatcgtgaagccataaacaggaatgcctttggcaatagccttgagcctagagggccctctgatgccccactgaggtgctgttggtttattgctggcaacgtgaattctctcaggggtctaggaggggcattttggaga

SEQ ID NO: 1359 - DNA, 41 bp, Homo sapiens
tttctcctggatcctgccctgctctcagccatagtgaagga

SEQ ID NO: 1360 - DNA, 500 bp, Homo sapiens
ggggtcatgacccttccctccatcggcatccccctgctattgtggtactccagcaagaggaaatatgacactcccaaaacgaagaagaactgattggggcttccacagccctcctctcccaagaaatccaggctcctctcccaagaaatccaggtgctttccagactccaaagggtatcttaaatgcaatctcttctctcttagcccttggccactttctcctggatcctgccctgctctcagccatagtgaaggaccagccctaggagtctgcgagagcctccttggttccatcgtgaagccataaacaggaatgcctttggcaatagccttgagcctagagggccctctgatgccccactgaggtgctgttggtttattgctggcaacgtgaattctctcaggggtctaggaggggcattttggagactgcctgacaccacccctatcccctgcctccccctctcagaagagggtggaagatgaaatgaaagctatgg

SEQ ID NO: 1361 - DNA, 36 bp, Homo sapiens
tttctaattctgtttcagatgttggatgacaataac

SEQ ID NO: 1362 - DNA, 25 bp, Homo sapiens
gctcgccagaaacccagagctaatt

SEQ ID NO: 1363 - DNA, 160 bp, Homo sapiens
tctcaacaaggcaaaccgttaagaaaggatcggtctgcagaagaaacttttcagctctctcggtggacaccttttatcaaagatattatggaggatgctattgataatagattagattcaaaagaatggccatattgttcccagtgtccagcagtatgga

SEQ ID NO: 1364 - DNA, 36 bp, Homo sapiens
gcccccttgtccccgcagggcccgcgccgcccgccg

SEQ ID NO: 1365 - DNA, 36 bp, Homo sapiens
atgtccagctgcatttagagcgccagtggaacatgt

SEQ ID NO: 1366 - DNA, 53 bp, Homo sapiens
agaagtttctctgaggaactgtgcagtaagttgtgctggtgaaaaaggaggag

SEQ ID NO: 1367 - DNA, 373 bp, Homo sapiens
gcaggatcaaggtgaaaaggagaaccccatgcgggaacttcgcatccgcaaactctgtctcaacatctgtgttggggagagtggagacagactgacgcgagcagccaaggtgttggagcagctcacagggcagacccctgtgttttccaaagctagatacactgtcagatcctttggcatccggagaaatgaaaagattgctgtccactgcacagttcgaggggccaaggcagaagaaatcttggagaagggtctaaaggtgcgggagtatgagttaagaaaaaacaacttctcagatactggaaactttggttttgggatccaggaacacatcgatctgggtatcaaatatgacccaagcattggtatctac

SEQ ID NO: 1368 - DNA, 25 bp, Homo sapiens
cctggggtcatcgattcaaactgct

SEQ ID NO: 1369 - DNA, 131 bp, Homo sapiens
ccactgcttgatgtccaggcagggagcctccagagtagacaagccctcaaggatgcccggtccccatcaccggcacacattgtctctaacaaagtgccagtggtgcagcaccctcaccatgtccaccccct

SEQ ID NO: 1370 - DNA, 36 bp, Homo sapiens
gtggtcatgatgaaaatggaacaccagatgcatttt

SEQ ID NO: 1371 - DNA, 25 bp, Homo sapiens
aagaacccatttcccctgctgtttc

SEQ ID NO: 1372 - DNA, 54 bp, Homo sapiens
gtggagatcaaagcaacccaaagagcaagaaggagaagaagaaatccgacaaga

SEQ ID NO: 1373 - DNA, 88 bp, Homo sapiens
ggtggtgaagattataatcacaacaacatcaaccagtggactgcaagcatagtggaacaatccttaacacacctggttaagttgggaa

SEQ ID NO: 1374 - DNA, 26 bp, Homo sapiens
agactgcttttgttgttgatgaagtg

SEQ ID NO: 1375 - DNA, 500 bp, Homo sapiens
ggagtttagttctaaattgactttacgtattactgcagttaattccttttttggctagggatggtttgataaaccacaattggctgatattgaaaatgaaagaaacttaaaaggtgggatggatcatgattactgtcgataactgcagataaatttgattagagtaataattttgtcatttaaaaacacagttgtttatactgcccatcctaggatgctcaccttccaagattcaacgtggctaaaacatcttctggtaaattgtgcgtccatattcattttgtcagtagccaggagaaatggggatgggggaaatacgacttagtgaggcatagacatccctggtccatcctttctgtctccagctgtttcttggaacctgctctcctgcttgctggtccctgacgcagagaccgttgcctcccccacagccgtttgactgaaggctgctctggagacctagagtaaaacggctgatggaagttgtgggacccacttcc

SEQ ID NO: 1376 - DNA, 28 bp, Homo sapiens
gaaactcgccagtgagaagacagagatg

SEQ ID NO: 1377 - DNA, 200 bp, Homo sapiens
gtgctggagatcagaatttatttacctctgtttatccaacgctctctcagcagcttccaagagaaccaatggaatggagaaggtcctatggccgggctccgaagatgattcacctagagtctaactttgttcaattcaaagaggagctgctgcccaaagaaggaaacaaagctctgctcacgtttcccttcctccatatt

SEQ ID NO: 1378 - DNA, 75 bp, Homo sapiens
ggaaatttcaagcatgcatctcctattctgccaatcactgaattctcagacatacccagaagagcaccaaagaaa

SEQ ID NO: 1379 - DNA, 169 bp, Homo sapiens
gcgccgctccggctgcaccgcgctcgctccgagtttcaggctcgtgctaagctagcgccgtcgtcgtctcccttcagtcgccatcatgattatctaccgggacctcatcagccacgatgagatgttctccgacatctacaagatccgggagatcgcggacgggttgtgc

SEQ ID NO: 1380 - DNA, 36 bp, Homo sapiens
aagaaaatggtgtccaagtacaaatacagagaccta

SEQ ID NO: 1381 - DNA, 430 bp, Homo sapiens
ttcaatgactattaaaacaggaaagcatgttgatgcaaatgggaagatatatcttccttatctacatgaatggaaacacccacagtcagacttgttggggcttattcaggtcatgattgtggtatttggagatgaacctccagtcttctctcgtcctatttcggcatcctatccgccataccaggcaacggggccaccaaatacttcctacatgccaggcatgccaggtggaatctctccatacccatccggataccctcccaatcccagtggttacccaggctgtccttacccacctggtggtccatatcctgccacaacaagttctcagtacccttctcagcctcctgtgaccactgttggtcccagtagggatggcacaatcagcgaggacaccatccgagcctctctcatctctgcggtcagtgac

SEQ ID NO: 1382 - DNA, 167 bp, Homo sapiens
caatcagcgaggacaccatccgagcctctctcatctctgcggtcagtgacaaactgagatggcggatgaaggaggaaatggatcgtgcccaggcagagctcaatgccttgaaacgaacagaagaagacctgaaaaagggtcaccagaaactggaagagatggttacc

SEQ ID NO: 1383 - DNA, 500 bp, Homo sapiens
tatattgactgaatcagaaattaaattggatggtgtcagacaaaagatattccaggtagcccaagagctatcaggggaagatatgcatcagttccatcgagccattactacaggactacaggaatatgtggaagctgtctcttttcaacacttcatcaaaacacgatcattaattagtatggatgaaattaataaacaattgatatttacgactgaagacaatgggaaagaaaataaaactccctcctctgatgcacaggataagcagtttggtacttggagactgagagtcacacctgtcgattaccttctgggagtggctgacttaactggagaattgatgcggatgtgtattaacagtgtggggaatggggacattgataccccctttgaagtgagccagtttttacgtcaggtttatgatgggttttcattcattggcaacactggaccttacgaggtttctaagaagctgtataccttgaaacaaagtttggcca

SEQ ID NO: 1384 - DNA, 67 bp, Homo sapiens
accatcgagaatgtcaaggcaaagatccaagataaggaaggcattccttctgatcagcagaggttga

SEQ ID NO: 1385 - DNA, 500 bp, Homo sapiens
taacatctatgaatggagatcaaccattctagggcctccaggatccgtgtatgagggtggtgtattctttctcgatatcacttttacaccagaatatcccttcaagcctccaaaggttacatttcggacaagaatctatcattgtaatattaacagtcaaggtgttatttgcttggacatattgaaagataattggagtccagcactaaccatttctaaagtcctcctttctatctgctcacttcttacagactgtaatcctgccgaccccttggtgggaagtattgccactcagtatatgaccaacagagcagaacatgacagaatggccagacagtggaccaagagatacgctacataaattggggtttcacaattcttacattatttgtctgtcacagaagagagctgcttatgattttgaaggggtcagggagggtgggagttggtaaagagtagggtatttctataacagatattattcagtcttatttcctaag

SEQ ID NO: 1386 - DNA, 92 bp, Homo sapiens
ctcaagatggtgcttctcagttccaagaagtcattcggcaagagctagaattatctgtgaagaaggaactagaaaaaatactcaccacagca

SEQ ID NO: 1387 - DNA, 36 bp, Homo sapiens
tggctggtaagcaggccgtttcagcatcaggcaagt

SEQ ID NO: 1388 - DNA, 127 bp, Homo sapiens
gagctcaggaaggtggatgaggccatcgccctattccagaagatgctgtgatccaccacccagcttcacccctcacccccagcggctcaccatggggatggcagcaataaaatattttcccacaaaa

SEQ ID NO: 1389 - DNA, 26 bp, Homo sapiens
cagagtcagttggcagtgatgcacct

SEQ ID NO: 1390 - DNA, 190 bp, Homo sapiens
ggaagttcgtactgggcagaacgcgacgggtctgcggcttaggtgaaaatgcctcgtgtaaaagcagctcaagctggaagacagagctctgcaaagagacatcttgcagaacaatttgcagttggagagataataactgacatggcaaaaaaggaatggaaagtaggattacccattggccaaggaggct

SEQ ID NO: 1391 - DNA, 61 bp, Homo sapiens
agcagctcagactgccagagatcgaaagaaggctcgaatgagtgagctggaacagcaagtg

SEQ ID NO: 1392 - DNA, 36 bp, Homo sapiens
tctctgggttggcttcagctgctgtaagtaaagatg

SEQ ID NO: 1393 - DNA, 225 bp, Homo sapiens
aacctagagaaagttgaaaacccagctgaagtcattagagaacttatttgttattgcttggacaccattgcagaaaatcaagccaaaaatgagcacctgcagaaagaaaatgaaaggcttctgagagattggaatgatgttcaaggacgatttgaaaaatgtgtgagtgctaaggaagctttggagactgatctttataagcggtttattctggtgttgaatgag

SEQ ID NO: 1394 - DNA, 71 bp, Homo sapiens
tgaaatgactgctgaccgagatccagtctatgatgagagtactgatgaggaaagtgaaaaccaaactgatc

SEQ ID NO: 1395 - DNA, 36 bp, Homo sapiens
aatgctattcttgtggagaattcggacacattcaaa

SEQ ID NO: 1396 - DNA, 500 bp, Homo sapiens
gaatgtaatgaatgtggaaagttattctcccagttgtcatacctcactatccatcatagaactcattcaggagtaaaaccctatgaatgtagtgaatgtgggaaaaccttctaccagaactcagccctttgtagacatcggagaatacacaaaggagagaagccctatgaatgctatatatgtggaaaattcttctctcagatgtcatacctcactatacatcatagaattcattcaggagagaagccctatgaatgtagtgaatgtgggaaaaccttctgccagaattcagcccttaatcgacatcagagaacacacacaggagagaaagcctacgaatgttatgaatgtgggaagtgcttctctcagatgtcctatctcactatacatcatcgaattcattcaggagagaaaccctttgaatgtaatgagtgtggaaaagccttctctcggatgtcatacctcactgtacattatagaactcattcaggagagaaacc

SEQ ID NO: 1397 - DNA, 36 bp, Homo sapiens
ccttctacctgaattcagccctcatgagacatcaga

SEQ ID NO: 1398 - DNA, 36 bp, Homo sapiens
aattctaccacaaatcagcattcaacagccatcaga

SEQ ID NO: 1399 - DNA, 500 bp, Homo sapiens
ctgccagaagggaacccttactgtgcatcagagaacacacacaggggagaagccctatgaatgtaatgaatgtgggaagaacttttaccagaagttacacctcattcagcatcagagaactcactcaggagagaagccctatgaatgtagttattgtggaaaatccttttgccagaagacacacctcacacaacatcagagaacacattcaggagagagaccttatgtttgtcatgactgtgggaaaaccttctcgcagaagtcagcacttaatgaccatcagaaaattcacacaggtgtgaaactctacaagtgtagtgaatgtgggaaatgcttctgccgcaagtctactctcacgacccacctgaggacccacacaggagagaaaccgtatgaatgtaatgagtgtggaaaattcttctctcggttgtcatatctcactgtacattatagaactcattcaggagagaaaccctatgaatgtaatgaatgtggaaaaa

SEQ ID NO: 1400 - DNA, 500 bp, Homo sapiens
ctgaattcagccctcatgagacatcagagagtgcacacaggagagaaaccttacgaatgtaatgaatgtggaaagttattctcccagttgtcatacctcactatccatcatagaactcattcaggagtaaaaccctatgaatgtagtgaatgtgggaaaaccttctaccagaactcagccctttgtagacatcggagaatacacaaaggagagaagccctatgaatgctatatatgtggaaaattcttctctcagatgtcatacctcactatacatcatagaattcattcaggagagaagccctatgaatgtagtgaatgtgggaaaaccttctgccagaattcagcccttaatcgacatcagagaacacacacaggagagaaagcctacgaatgttatgaatgtgggaagtgcttctctcagatgtcctatctcactatacatcatcgaattcattcaggagagaaaccctttgaatgtaatgagtgtggaaaagcctt

SEQ ID NO: 1401 - DNA, 36 bp, Homo sapiens
attatagaactcattcaggagagaaaccctatgaat

SEQ ID NO: 1402 - DNA, 324 bp, Homo sapiens
tgatgaagacattcttctcaacagggcaaggcaatacagaagcgttccacacagggacattgcaaagacaagcaagtcatcacattggagatttttgcttccagaaaattgagaaagacattcatggcttccagtttcagtggaaagaagatgaaacaaatgaccatgcagcacccatgacagaaatcaaagagttgactggtagtacaggccaacatgatcaaaggcatgctggaaacaagcatattaaagatcagcttggattaagctttcattcgcatctgcctgaactgcacatatttcagcctgaagggaaaattggta

SEQ ID NO: 1403 - DNA, 493 bp, Homo sapiens
aggctaaagtgcagtggtgtcacctcggctcactgcaacctccacttcccaggttcaagcaattctcctgcctcagccttccaagtagctgggactacagatatctcttccaaatgcatgatgaagacattcttctcaacagggcaaggcaatacagaagcgttccacacagggacattgcaaagacaagcaagtcatcacattggagatttttgcttccagaaaattgagaaagacattcatggcttccagtttcagtggaaagaagatgaaacaaatgaccatgcagcacccatgacagaaatcaaagagttgactggtagtacaggccaacatgatcaaaggcatgctggaaacaagcatattaaagatcagcttggattaagctttcattcgcatctgcctgaactgcacatatttcagcctgaagggaaaattggtaatcaagttgagaagtctatcaacaatgcttcctcagtttcaacatcccaaa

SEQ ID NO: 1404 - DNA, 78 bp, Homo sapiens
ggtattgtgttcacaaaccagaggtgatcttcaggctgcaacaaggagaagagccatggaaacaggaggaagaattcc

SEQ ID NO: 1405 - DNA, 337 bp, Homo sapiens
tgtaaagattgtgacaaagcctttaaacggttctcacacctgaataaacataagaaaattcatacttgagagaaatcctacaaatgtaaagaatgtggcaaacctttggatgatccacaaaccttaatgaacatgagaaaatttatactgtagagaaaccctggaaatgtgaagaacgtggcaaagttctttacctcattctcaaaccttgataaacataagagaattcataccggagagaaactgtacaaatgtgaagaatatggcaaagcctgtgaatggtccacaaacctgaatgagcagaagaaaattattactggagataaaccctgcaaat

SEQ ID NO: 1406 - DNA, 36 bp, Homo sapiens
acagctcatcatctcaaggtccatgagaggtcacac

SEQ ID NO: 1407 - DNA, 36 bp, Homo sapiens
gaaacctggtctcactggatgttttgaacagagata

SEQ ID NO: 1408 - DNA, 211 bp, Homo sapiens
gacccagctcagagaagcctgtataaagatgtcatgatggagaattatggaaacctggtctcactggatgttttgaacagagataaggatgaggagccaactgtaaaacaagagattgaagaaattgaggaagaagtggaaccacagggtgtaatagttacaagaatcaaaagtgaaattgaccaggatcctatgggtagagaaacatttg

SEQ ID NO: 1409 - DNA, 353 bp, Homo sapiens
ggccctgaaaaggagcctttaaaagtcaattctactccatttggcaaagagggaactgaaatctggaaagtaaggacttgcccaaggtcactgacttagtggcagactagagacttgaactcaggtctccattcccaggttcctaggcactggctttgacatactctgaaacttcaaatggagaacgtaaaaggagtttcgtaaaccagctgaccctaaattcttagagatttacttgttggtgccagggtagcaggaagggctaccagttctcttttcagccttatatgaagatgtttcagcattaaaaagtacagatgctctgcctcagcagatttgtcaaattactgatg

SEQ ID NO: 1410 - DNA, 36 bp, Homo sapiens
aaactttcagaagttgagcgaagtctgagtaatact

SEQ ID NO: 1411 - DNA, 500 bp, Homo sapiens
gtactctcagaactgaagttgaagtttgaaatgactgagcaggaaaagcagtcaatcacagatgagctcaaacagtgtaaaaacaacctgaagctgctccgagagaaaggaaataataaaccctggccctggatgcccatgttggctgccctggttgcagtaacagccatcgtgctgtacgtgccaggtctggccagagcttctccatgagagcgttccttgagtccgtacaccgtcctccctctagaagctggcatcacactcatgctggggacaaacagaaccattttcttcctctttacctcttaaaacagcagaagtacaagaatacagctgtagggtcattgctttaaattatataaaatgtatctgtctataaagaagatataaaattgtgactttattctactgtaagcaataatttgcttgcaatttttcatgtaatttttaaattagtatgttaagattctgaatattatggtggcctaaagtaggcttct

SEQ ID NO: 1412 - DNA, 26 bp, Homo sapiens
cacccagtttcatgcctcttgtcttg

SEQ ID NO: 1413 - DNA, 500 bp, Homo sapiens
gttaaggaaaagacccctcatcgtatttgatggaagttcaacaagtacaagcataaaagtgaaaaagacagagaatggagataatgatcgactgaagcctcccccgcaggcaagctttaccagtaatgcctttagaaaattatcaaattcctcttcgagtgtttcacccctaattttgtcttccaatttgcctgtgaacaataaaacggaacacaataataatgacgctaaacagaaccatgacttaacgcataggaaaagtccttcaggccctgtgaagtcgccaccattgtcccctgttggaactactccagtgaagttaaagagagctgctcctaaagaagaggcagaggccatgaataacctgaagcccccacaagcaaaaaggaagatacaacatgttacttggccctgaagaaaagtttccaaaaatgtaaatatactgtaactgtagtttttcaaatatgttcatatatattgacaatatttacagaaatcct

SEQ ID NO: 1414 - DNA, 45 bp, Homo sapiens
gaggatgcaacacatcttgaagataacgaatgtgatatcaaattg

SEQ ID NO: 1415 - DNA, 195 bp, Homo sapiens
agacatttgtatgggtcatttcaaagagggcttatgaggctgtgaaacccagagctcttaacgctgtgaccaaagatggaagttctctataggaagccatagcactcctaatgtttggtgctatgttttcctgaggagatataaaacgtaataatccatgattgttgccatgtgagagttttaaaggttaatcaa

SEQ ID NO: 1416 - DNA, 25 bp, Homo sapiens
cagacaccaaaaaccagtgagagcc

SEQ ID NO: 1417 - DNA, 500 bp, Homo sapiens
acccagaaactgtagcagagtggaagaaaaaactcagaacagctaatgaaatctatgaaaaagtgaaagatgatgtggataagctaaaggaggcaaataaaaaattgaaattggaaaatggtggtctggtgagggagaatttacgactgaaggctgaagttgataacagatcacctcaaaagtttggaaggtttgcagttgctgctcttcagtccaaagtagaacagtatgagcgtgaaaccaatcgcctcaagaaagccctggaacgaagtgataagtatatagaggaactagaatctcaagttgcacagctaaaaaattcaagtgaagagaaagaagctatgaattccatttgccagacagcactttctgcagatggcaaagggagcaaaggcagtgaggaggatgtggtgtcaaagaatcaaggcgatagtgccagaaagcagcctggctcatccacctccagttcttctcacctagcgaagccttccagcagcaga

SEQ ID NO: 1418 - DNA, 500 bp, Homo sapiens
ttggaaaatggtggtctggtgagggagaatttacgactgaaggctgaagttgataacagatcacctcaaaagtttggaaggtttgcagttgctgctcttcagtccaaagtagaacagtatgagcgtgaaaccaatcgcctcaagaaagccctggaacgaagtgataagtatatagaggaactagaatctcaagttgcacagctaaaaaattcaagtgaagagaaagaagctatgaattccatttgccagacagcactttctgcagatggcaaagggagcaaaggcagtgaggaggatgtggtgtcaaagaatcaaggcgatagtgccagaaagcagcctggctcatccacctccagttcttctcacctagcgaagccttccagcagcagactgtgtgacaccagttctgcaaggcaggaaagtaccagcaaagcagaccttaactgttctaagaacaaagacctatatcaagaacaggtagaagtaatgttagatgtgac

SEQ ID NO: 1419 - DNA, 500 bp, Homo sapiens
aagaaagctatctctctcctttctaaattacggaatgaattgcaaacagataaaccatttatccccttggttgagaaatttgttgatactgatatatggaatcagtacctagaatatcaacagagtcttttaaatgaaagtgatggaaaatcaagatggttctactcaccgtggttgttggtagaatgttacatgtatcgaagaattcatgaagcaattatccagagtccaccaatcgattactttgatgtatttaaagaatcaaaagagcaaaatttctatgggtcacaggaatccatcattgctttatgtactcacctgcaacaattgataagaactattgaagacctagatgaaaatcagctgaaagatgagttttttaaacttctgcagatttcactgtggggaaataagtgtgatctgtctctctcaggtggagaaagtagttctcagaataccaatgtactaaattcattggaagacctaaaacctttcatttt

SEQ ID NO: 1420 - DNA, 36 bp, Homo sapiens
ttccattcaagccagatggtgagtaacgtactactt

SEQ ID NO: 1421 - DNA, 227 bp, Homo sapiens
ggtggtgattccactgaagcaactgccaaaccaaagagaagtttttatgctgccagggatttgtacaagtaccgacaccagtacccaaacttcaaagatatccgatatcaaaatgacttgagcaatcttcgtttttataagaataaaattccattcaagccagatggtgtttacattgaagaagttctaagtaaatggaaaggagattatgaaaaactggagcacaa

SEQ ID NO: 1422 - DNA, 51 bp, Homo sapiens
gcaactgccaaaccaaagagaagtttttatgctgccagggatttgtacaag

SEQ ID NO: 1423 - DNA, 500 bp, Homo sapiens
tgatacagctgaaaaagccctcaatgtcattgttgacttactagaaaaatatggccagggtggaaattgcacagagggtagaatggtatttagctatcacaacagtttcctgatagctgataggaatgaagcctggattctggagactgcagggaagtactgggcagcagaaaaagtacaagagggagttcgtaatatttctaatcaactttccataacaaccaagattgcccgggaacacccagacatgagaaactatgctaagcggaaaggttggtgggatggtaaaaaggagtttgattttgctgcagcatattcctatcttgacacagccaagatgatgacttcatcaggcagatactgtgagggctacaagcttctaaataagcacaaaggaaatataacttttgaaacaatgatggaaattcttcgagataaaccaagtggcattaatatggagggagaattcctgaccactgcaagcatggtttctattttac

SEQ ID NO: 1424 - DNA, 36 bp, Homo sapiens
agcagcctggaggccatggttcagagtattgagttc

SEQ ID NO: 1425 - DNA, 500 bp, Homo sapiens
attatgaaagagtattagaactagaaccaaataactttgaagcaacaaatgaactcaggaaaatcagtcaggctttagcatccaaagaaaactcatatccaaaggaagctgacatagtgattaagtcaacagaaggagagcgaaagcaaattgaagcacaacagaataagcagcaggccatttcagagaaagatcgggggaatggatttttcaaagaggggaaatatgaaagagcaattgaatgctatactcgagggatagcagcagatggtgctaatgcccttcttccagctaacagagctatggcctatctgaagattcagaaatatgaagaagctgaaaaagactgcacacaagccattttattagatggctcatattctaaagcttttgccagaagaggaactgcaagaacatttttgggaaagctaaatgaggcaaaacaagattttgaaactgttttacttctggaacctggaaataagcaagcagtaactgaa

SEQ ID NO: 1426 - DNA, 92 bp, Homo sapiens
gaggggaaatatgaaagagcaattgaatgctatactcgagggatagcagcagatggtgctaatgcccttcttccagctaacagagctatggc

SEQ ID NO: 1427 - DNA, 36 bp, Homo sapiens
atcttcaccaaaggcaaggtaatcagtaccaccact

SEQ ID NO: 1428 - DNA, 34 bp, Homo sapiens
atatgactcagggaaaagcctcagcgaagaggac

SEQ ID NO: 1429 - DNA, 500 bp, Homo sapiens
atatgactcagggaaaagcctcagcgaagaggacccagcaggaatcatgagggaaggaaaatgcagcactctaaatggccactcaggcgttcctattcactcggaaaattaggttcatttcacaggacacagcagtgtagatcaggcttcaacttaacatttaagggaaatgtcagatttttttttaatttaatgaaattgttaatgaggaaaaatttttaatatagtcttatctaccacacatccccatagatttaaggattttaatagaaagacatgatgtatgtatttaagccacgttaaaagaaaaaatataactatggaccggtattcagtgaatacagtttcatggtttttaattctttcaaagcacattaaaaatggtgtgctgataaaccccaagtaaattaaccctttttccgtataaatccattttttgttttgaagaggggaaattatatttattgttgtttactgaatcctggtgtgaaagcatatca

SEQ ID NO: 1430 - DNA, 36 bp, Homo sapiens
gaaatggcttgggcagtggtcaatgaaattgaaaaa

SEQ ID NO: 1431 - DNA, 500 bp, Homo sapiens
caattgaatgccatcagagataatatcaaaattggagaagatcgtgctgctagacttgacaggaaaatggaagaacagcaggtcagacttaatgaggcagaacaaaagtacaaggatattcaagacaaactagaaaagattagtgaagagacaaatgcacgagcaccagaatgtatggcattgaaagcagatgttgttgctaagaaaagggcctataatgaagctgaggttttatataaccgatccttaaacgaatataaagcattaaagaaagatgatgagcagctttgtaaacgaattgaagagctgaaaaaaagtactgaccaatctttggaacctgaacggttggaaagacaaaaaaaaatatcttggttaaaagagagagtaaaggcctttcaaaatcaagaaaattcagtcaatcaagagatcgaacagtttcagcaagccatagaaaaggacaaagaagaacatggcaaaattaagagagaagaattagatgt

SEQ ID NO: 1432 - DNA, 111 bp, Homo sapiens
gaacaaaagtacaaggatattcaagacaaactagaaaagattagtgaagagacaaatgcacgagcaccagaatgtatggcattgaaagcagatgttgttgctaagaaaagg

SEQ ID NO: 1433 - DNA, 151 bp, Homo sapiens
aactgagacaacaatgcaagtgggtaatagtcaaacaaaagttaaaggtgaagattcaaaaaatataccattggagaaagaaacaagaaaatcactggtttcagattcaggtggacaaaggacaagtgataaaatccaagaatatccacag

SEQ ID NO: 1434 - DNA, 36 bp, Homo sapiens
atccaagaatatccacagatcactgcccaaagcgga

SEQ ID NO: 1435 - DNA, 425 bp, Homo sapiens
acttaaaagtgaggggaaaactgagacaacaatgcaagtgggtaatagtcaaacaaaagttaaaggtgaagattcaaaaaatataccattggagaaagaaacaagaaaatcactggtttcagattcaggtggacaaaggacaagtgataaaatccaagaatatccacagctcagagaagaaacgatctagccctgctatttcagatctttcacagatccttaagtctcaagatgaatcagcatttttagagagttcaaatgaagtttcagttgctgaaaaccaatcctataaatctccatcagagacccatgataaatcacttacaacagtatcatccagcaaagaagttcaagattcactgtctgttggaacattggctcaaaaaaacgaaacagtgatatcaccattcattttacctcctgtt

SEQ ID NO: 1436 - DNA, 500 bp, Homo sapiens
tcactggtttcagattcaggtggacaaaggacaagtgataaaatccaagaatatccacagctcagagaagaaacgatctagccctgctatttcagatctttcacagatccttaagtctcaagatgaatcagcatttttagagagttcaaatgaagtttcagttgctgaaaaccaatcctataaatctccatcagagacccatgataaatcacttacaacagtatcatccagcaaagaagttcaagattcactgtctgttggaacattggctcaaaaaaacgaaacagtgatatcaccattcattttacctcctgttcttacagaaagtaaaaaggctgatgtttcagaagaacaattacaaaagatgactgaagaacaaacttaccaagcagcagaaaaatctcaagctcataatgaagtaccaaatgaaaggcttgtagttgagcatcaagaatcattgtcaaaaaccaaattacaagtaaagaaacaagaaacttcta

SEQ ID NO: 1437 - DNA, 354 bp, Homo sapiens
gaggacgaggaagaagaagatgacaaagatgacaaggacagtgaaaaaaagggatttataaataaaatctatgccatccaggaggtatgtgtcagtgtccagaacatcctagatgaagtggcttcctttggcgaaaggattaagaatactttcaactggactgtcccattcttaagctggctggccattgtagccctctgtgtgttcacagccatcctgtactgcattccgctgagatacattgtccttgtctggggcatcaataaatttacaaaaaagcttcggagtccatatgcaattgataacaatgaactacttgacttcctttccagagtcccttcagatgtacaagtg

SEQ ID NO: 1438 - DNA, 288 bp, Homo sapiens
attaagaatactttcaactggactgtcccattcttaagctggctggccattgtagccctctgtgtgttcacagccatcctgtactgcattccgctgagatacattgtccttgtctggggcatcaataaatttacaaaaaagcttcggagtccatatgcaattgataacaatgaactacttgacttcctttccagagtcccttcagatgtacaagtggtgcaataccaagaactgaaaccagatccttctcatagcccatataaaagaaagaaaaacaatcttggctag

SEQ ID NO: 1439 - DNA, 204 bp, Homo sapiens
atcagaatgaaacgttgtgtcatggtgctggtaaatgctgcatactacgttaatagttgctttgattgggattcacccccaaggagtctcgctgcttttgtgctctttctctttgttgtctggaactttgagctctacatgataccactggttttgttgttactattgacatggaactacttcttgataatatcagggaaagat

SEQ ID NO: 1440 - DNA, 231 bp, Homo sapiens
cttcctgtcctgggcttctgcagagcagagcttcagaatccttattgcaaaaatgtacaatttcagacccaaagtttacgcctatcagacctacacagaaaatcgcatctttggagaggaatagtcagcatcaccttgattgaagggagagacctcaaggccatggattccaacgggttgagcgatccctacgtgaagttccggcttgggcatcagaagtacaagagcaag

SEQ ID NO: 1441 - DNA, 107 bp, Homo sapiens
tgaagtttaaaatcggaggaaaagaagtttttagaagtaagataatacacaagaacctcaaccctgtgtgggaagaaaaagcttgtattctggttgatcatcttagg

SEQ ID NO: 1442 - DNA, 497 bp, Homo sapiens
attatgccaaaaacgttgaatcctcagtggagggaacaatttgattttcacctttatgaagaaagaggaggagtcattgatatcactgcatgggacaaagatgctgggaaaagggatgatttcattggcaggtgccaggtcgacctgtcagccctcagtagggaacagacgcacaagctggagttgcagctggaagagggtgagggacacctggtgctgctggtcactctgacagcatcagccacagtcagcatctctgacctgtctgtcaactccctggaggaccagaaggaacgagaggagatattaaagagatatagcccattgaggatatttcacaacctgaaagatgtgggatttctccaggtgaaagtcatcagagcggaagggttaatggctgccgacgtcactggaaaaagtgacccattttgtgtggtagaactgaacaacgatagactgctaacacatactgtctacaaaaatctcaatcctgagtg

SEQ ID NO: 1443 - DNA, 500 bp, Homo sapiens
aaagcctacgtcttgaaaaacaagcagctgacagggccaacaaagggggtcatctatcttgaaatagatgtgatttttaatgctgtgaaagccagcttacgaacattaatacccaaagaacagaagtacattgaagaggaaaacagactctctaaacagctgctactaagaaactttatcagaatgaaacgttgtgtcatggtgctggtaaatgctgcatactacgttaatagttgctttgattgggattcacccccaaggagtctcgctgcttttgtgctctttctctttgttgtctggaactttgagctctacatgataccactggttttgttgttactattgacatggaactacttcttgataatatcagggaaagataacaggcaacgtgatacagtagtggaggacatgctagaggacgaggaagaagaagatgacaaagatgacaaggacagtgaaaaaaagggatttataaataaaatctatgccatccagga

SEQ ID NO: 1444 - DNA, 74 bp, Homo sapiens
cccattcttaagctggctggccattgtagccctctgtgtgttcacagccatcctgtactgcattccgctgagat

SEQ ID NO: 1445 - DNA, 500 bp, Homo sapiens
gtgtgacagtgatgagagtgatgacagcgatatcctagttagaaaagtaggtgttaaacgtccccgtagagtggttgaagatgaaggttcttcagtggaaatggagcaaaagactcctgaaaaaacattagctgcacaaaagcgagaaaaacttcagaagctcaaagaactctcaaaacaaagatctcgtcagagacgcagtagtggtagagattttgaggactctgaaaaggaatcttgcccaagcagtgatgaagttgatgaggaggaagaagaggataattatgaatctgatgaagatggagatgattatattatcgatgactttgtagtgcaagatgaggagggtgatgaagagaataaaaaccaacaaggagaaaaattgactacatcacaactgaaattagtaaaacagaattctctttattcttttagtgaccactatactcattttgaaagagttgtgaaggctcttctgatcaacgctttagatgaatctt

SEQ ID NO: 1446 - DNA, 500 bp, Homo sapiens
cgccagaattattcaggtgccctggagactatgaaccagataatcgtgaattttccgagcttccttcctgcttttgttaagaaaatgaaattacaactagccttgcaggattgggaccagacagttgagacagcacaaaggttgctgctccaagatagccaaaatgtggaagcactgagaatgcaggcactctactatgtgtgtagagagggggatatagagaaggcttccaccaagctggaaaacttgggaaatgcattggatgccatggaaccacagaatgctcaacttttctataacattacactcgccttcagcagaacttgtggacgtagtcaacttattcttcaaaaaattcaaacgttacttgagagagcttttagtttaaaccctcagcaatcagaatttgctacagaacttggataccaaatgattttacaaggaagagttaaagaggcactgaagtggtataagaccgccatgacacttgatgagactag

SEQ ID NO: 1447 - DNA, 36 bp, Homo sapiens
cgatttcctcccctgaagtgctgccgggccaccact

SEQ ID NO: 1448 - DNA, 36 bp, Homo sapiens
taaataataaaggaagaagtcagctgggtgcagagg

SEQ ID NO: 1449 - DNA, 405 bp, Homo sapiens
tatagagatgtagcagagtgtgggcctcaacaagaacttgatttaaactctccacgaaataccactttggaaagacagactttctattgtgttccggtgcctggggaatctacgtgggtaaaagaagcctatgttaatgcaaaccaagctcgagtcagtccctcaacatcctacactcctagtcgccacaagaggagttatgaagatgatgacgatatggacctacagcccaataagcagaaagaccaacatgcaggtgccagacaagcagggagtgttggtggtcttcaatggtgtggagagccaaaacgtttagaaactgaagcttctactgggcaacagctgaactctctgaacttgtcttctccttttgatttgaattttccattgccaggagagaagggc

SEQ ID NO: 1450 - DNA, 36 bp, Homo sapiens
ctcatcagctatcgtcagtgttagcatattttatgt

SEQ ID NO: 1451 - DNA, 36 bp, Homo sapiens
tggaagtcaacactgtcacatgtcagctgaactgtt

SEQ ID NO: 1452 - DNA, 280 bp, Homo sapiens
taaaatgcaaacagaaaacttgggtgttgtttattatgtcaacaaggacttcaaaaatgaatataaaggaatgttattacaaaaggtagaaaagagtgtggaggaagattatgtgactaatattcgaaataactgctggaaagaaagacaacaaaaaacagatatgcagtatgcagcaaaagtataccgtgatgatcgactccgaaggaaggcagatgccttgagcatggacaactgtaaagaattagagcggcttaccagtctttataaaggaggatga

SEQ ID NO: 1453 - DNA, 459 bp, Homo sapiens
accacttccaaggcaattcatagtatatttaagaatgctatacaactgctgcaggaaaaaggacttgttttccagaaagatgatggttttgataacctatactatgtaaccagagaagacaaagacctgcacagaaagatccaccggatcattcagcaggactgccagaaaccaaatcacatggagaagggctgtcacttcctgcacatcttggcctgtgctcgcctgagcatccgcccgggcctgagcgaggctgtgctgcagcaagttctggagctcctggaggaccagagtgacattgtcagcacaatggagcactactacacagcgttctgagcagagacacgcagaccagctgaggaggacaaagataaggtggcattcacccccaggctctgactttcagcatcatgcaggggcttatctgtctggaggcagttacctcataataaactataa

SEQ ID NO: 1454 - DNA, 355 bp, Homo sapiens
gacctgcacagaaagatccaccggatcattcagcaggactgccagaaaccaaatcacatggagaagggctgtcacttcctgcacatcttggcctgtgctcgcctgagcatccgcccgggcctgagcgaggctgtgctgcagcaagttctggagctcctggaggaccagagtgacattgtcagcacaatggagcactactacacagcgttctgagcagagacacgcagaccagctgaggaggacaaagataaggtggcattcacccccaggctctgactttcagcatcatgcaggggcttatctgtctggaggcagttacctcataataaactataaaatatagtcatcttgggaa

SEQ ID NO: 1455 - DNA, 335 bp, Homo sapiens
cctgaagctccttcagaacaagccagaagagtttttcaaacctacgacccagaagataatggattcatacccgattcacttctggaagatgtgatgaaagcattggaccttgtttcagatcctgaatatataaatctcatgaagaataaattagatccagaaggattaggaatcatattattgggcccatttcttcaagaattttttcctgatcagggctccagtggtccagaatcttttactgtctaccactacaatggattgaagcagtcaaattataatgaaaaggtcatgtacgtagaagggactgcagttgtgatgggttttgaagatcc

SEQ ID NO: 1456 - DNA, 128 bp, Homo sapiens
cctgaagctccttcagaacaagccagaagagtttttcaaacctacgacccagaagataatggattcatacccgattcacttctggaagatgtgatgaaagcattggaccttgtttcagatcctgaata

SEQ ID NO: 1457 - DNA, 56 bp, Homo sapiens
aaataactgtatattattgaagaatttactgatgccagacagttcacctaagagat

SEQ ID NO: 1458 - DNA, 107 bp, Homo sapiens
aaaaagatggaggagctcttattactggccaaggaaagcagtcggagcaaccatacaatttggtttggacactttacaacatccactattctttctccatcaccagg

SEQ ID NO: 1459 - DNA, 80 bp, Homo sapiens
aagcaaaggaacaaaatcagagactggatgaggaaattctggctttaagaaatagggttcgatcacttgactcagaaaaa

SEQ ID NO: 1460 - DNA, 36 bp, Homo sapiens
cctctctctcccttgcaggtgatgctggtgaaaaac

SEQ ID NO: 1461 - DNA, 221 bp, Homo sapiens
atttgcttcttacttcaacaaacagacttctcccaagattctcatcacaacatcagatagacctcatgggagaacagtacgactctgtgaacagctctccacagttataccaaactcacatgtttattacagaagaggactggctctgaaaaaaattattccacagtgcatcgcaagagatttcacagacctgattgttattaatgaagatcgtaaaaccc

SEQ ID NO: 1462 - DNA, 61 bp, Homo sapiens
tccaccaaagcctgtacccaagaccattgacaaccagcgagtgtatgatgaaaccacagta

SEQ ID NO: 1463 - DNA, 502 bp, Homo sapiens
ctcagcttgcgccgccgccgccgccgccgccgccgcgcacgccatgggagccgtgactgacgacgaagttatacggaagcgtctcctcattgatggagatggtgctggaggtgatcggagaattaatctgctagtgaagagtttcattaaatggtgcaactctgggtcccaggaggagggatatagccagtaccaacgtatgctgagcacgctgtctcaatgtgaattttcaatgggcaaaactttactagtatatgatatgaatctcagagaaatggaaaattatgaaaaaatttacaaggaaatagaatgtagcatagctggagcacatgaaaaaattgctgagtgcaaaaagcaaattcttcaagcaaaacgaatacgaaaaaatcgccaagaatatgatgctttggcaaaagtgattcagcaccatccagacaggcatgagacattaaaggaactagaggctctgggaaaagaattagagcatctttcacacattaaa

SEQ ID NO: 1464 - DNA, 36 bp, Homo sapiens
ccagagaaactggccaaggttgaaactccattggaa

SEQ ID NO: 1465 - DNA, 500 bp, Homo sapiens
agaatttgaatgaaatgcagtgcatgtggttccaaacagaatgtgcccaggcttataaagcaatgaataaatttggtgaagcacttaagaaatgtcatgagattgagagacattttatagaaatcactgatgaccagtttgactttcatacatactgtatgaggaagattacccttagatcatatgtggacttattaaaactagaagatgtacttcgacagcatccattttacttcaaggcagcaagaattgctatagagatctatttgaagcttcatgacaacccccttacagatgagaataaagaacacgaagctgatacagcaaacatgtctgacaaagagctaaagaagctacgtaataaacaaagaagagctcaaaagaaagcccagatagaagaagagaaaaaaaatgcagaaaaagaaaagcagcagagaaatcagaaaaagaagaaggatgatgatgatgaggagataggaggtccaaaagaagaacttatt

SEQ ID NO: 1466 - DNA, 500 bp, Homo sapiens
gttcctgaaggtgctgagacagagcaaggccttaaacgggagcttcaagttcttagattagctaatcatcagctggataaagagaaagcagaattaatccatcagatagaagctaacaaggaccaaagtggagctgaaagcaccatacctgatgctgatcaactaaaggaaaaaataaaagatctagagacacagctcaaaatgtcagatctagaaaagcagcatttgaaggaggaaataaagaagctgaaaaaagaactggaaaattttgatccttcattttttgaagaaattgaagatcttaagtataattacaaggaagaagtgaagaagaatattctcttagaagagaaggtaaaaaaactttcagaacaattgggagttgaattaactagccctgttgctgcttctgaagagtttgaagatgaagaagaaagtcctgttaatttccccatttactaaaggtcacctataaactttgtttcatttaactatttatt

SEQ ID NO: 1467 - DNA, 500 bp, Homo sapiens
ctattcgagcagacccagcattatgcttcttggaaagagtgggaaaacctgatgagaaagcagttgctgctgaacagagagcgaatgattatatggatggggatgtggaagatccagaatacaaacctgccccagccatctttaaagatgatatagaggatgatgtttcctcaccaggagatcttgttatagcagatggagatggtcaactgatggagggtgataaagtatattggcctactcaatcagctttaaccacacgtttgaggcgtctcatcactgcataccagcgtactaataaaaacagacaaattcagcagatacaaccgactttctcggtgcctaccagtgtaatgcagcctatttatgaggaagccactcttaatcctaaaatggcagccaagatagaaagacagcaaagatggacaagaagagaagaagctgacttttatagggttgtatctacatttggagtggtttttgaccctgacagaggccaa

SEQ ID NO: 1468 - DNA, 500 bp, Homo sapiens
agtagcctgaaaacaactttacttgagggctttgctggtgttgaggaagccagagaacaaaatgaaagaaatcgtgactctggttatctgcatttgctttataaaagaccactggatcccaagagtgaagctcagcttcaggaaattcggcgccttcatcagtatgtgaaatttgctgtccaagatgtgaatgatgttctagacttggagtgggatcagcatctggaacaaaagaaaaaacaaaggcacctgcttgtgccagagcgagagacactgtttaacaccctagccaacaatcgggaaatcatcaaccaacagaggaagaggctgaatcacctggtggatagtcttcagcagctccgcctttacaaacagacttccctgtggagcctgtcctcggctgttccttcccagagcagcattcacagttttgacagtgacctggaaagcctgtgcaatgctttgttgaaaaccaccatagaatctcacaccaaatcctt

SEQ ID NO: 1469 - DNA, 147 bp, Homo sapiens
gcgagagacactgtttaacaccctagccaacaatcgggaaatcatcaaccaacagaggaagaggctgaatcacctggtggatagtcttcagcagctccgcctttacaaacagacttccctgtggagcctgtcctcggctgttccttc

SEQ ID NO: 1470 - DNA, 500 bp, Homo sapiens
aagccaggctctccccaggcaaagtcacttcagcctgctgttgcagaaaagcagggacatcagtggaaagattcagatcctgtaatggctggaattggggaggagattgcacactttcagaaggagttggaagagttaaaagcccgaacttccaaagcctgtttccaagtgggcacttctgaggagatgaagatgctgcgaacagaatcagatgacttgcatacctttcttttggagattaaagagaccacagagtcgcttcatggagatataagtagcctgaaaacaactttacttgagggctttgctggtgttgaggaagccagagaacaaaatgaaagaaatcgtgactctggttatctgcatttgctttataaaagaccactggatcccaagagtgaagctcagcttcaggaaattcggcgccttcatcagtatgtgaaatttgctgtccaagatgtgaatgatgttctagacttggagtgggatcagcatctgga

SEQ ID NO: 1471 - DNA, 50 bp, Homo sapiens
aagcctgtgcaatgctttgttgaaaaccaccatagaatctcacaccaaat

SEQ ID NO: 1472 - DNA, 36 bp, Homo sapiens
aaaacatcgaattcagagagttccagaagacagcga

SEQ ID NO: 1473 - DNA, 500 bp, Homo sapiens
ttttttgcaggagctatccctgtatttttttcattttttattgtaactctcctatgccattataataattgggatcctgtgatggtgggaatcagaagaatatttgcttttatatgcagaaaacatcgaattcagagagttccagaagacagcgaacagtgtgagagtctcatttctatgcacagtgtttctcaggaggatggagctagttagctgtctgttgtctgtagcccagcttgataatggaactatacagcgaagagacaatctctggcaagtttttgtagaaaaaatgtttcagtgcctagtctgaaaaataacagtttgagttctttgaaactctaaaatatatttttctcatacctgttttcttcattttcataatgaagcactttgctatgtagctgtgtacatatcactacagttataggaagtttcagtctacagtccatccaaaggaccaacctgccttacacatctcaaggaattcagctgttgaa

SEQ ID NO: 1474 - DNA, 500 bp, Homo sapiens
cagcgaagagacaatctctggcaagtttttgtagaaaaaatgtttcagtgcctagtctgaaaaataacagtttgagttctttgaaactctaaaatatatttttctcatacctgttttcttcattttcataatgaagcactttgctatgtagctgtgtacatatcactacagttataggaagtttcagtctacagtccatccaaaggaccaacctgccttacacatctcaaggaattcagctgttgaaatcatttgaactaatcaaggaataaatcctaatgttctgggactttattttcacatgttaaatgctggaatatattatgaaaatgttttcaagaaatcacttaagtgttcatagaccagtatttctgacaggtaaaatgctaaaataagctacctgtaataagtgtggattatatttttgggttttgtagaatattgcaaattaaccacacaaaaaatgtttaatttatgcaacaagcatgtttgtgcaaatt

SEQ ID NO: 1475 - DNA, 36 bp, Homo sapiens
cctccagtgaagatgcaggtgatgctgatgggcccc

SEQ ID NO: 1476 - DNA, 36 bp, Homo sapiens
aaaatgcagactcgaaaagtaagtgaatttgaagaa

SEQ ID NO: 1477 - DNA, 97 bp, Homo sapiens
gcctgaatcaaaatgccctgagctgcttgccaattactgtgacatgttgctaagaaaaacaccattaagcaaaaaactaacctctgaagagattgaa

SEQ ID NO: 1478 - DNA, 36 bp, Homo sapiens
ttttgcttttccattgatcatctggagcataagaac

SEQ ID NO: 1479 - DNA, 500 bp, Homo sapiens
tgtgcccagtttctacaaataaaagatgggtggattattttctcgatggaggacaaaaccttcaactgtagaagttctagaaagtatagataaggaaattcaagcattggaagaatttagggaaaaaaatcagagattacaaaaattatgggttggaagattaattctgtattcctcagttctctatctgtttacatgcttaattgtatatttgtggtatcttcctgatgaatttacagcaagacttgccatgacactcccattttttgcttttccattgatcatctggagcataagaacagtaattattttcttcttttccaagagaacagaaagaaataatgaagcattggatgatttaaaatcccagaggaaaaaaatacttgaagaagtcatggaaaaagaaacttacaagacggctaaattaattcttgaaaggtttgatccggactcaaagaaagcaaaggagtgtgagccgccatctgctggagcagctgtaa

SEQ ID NO: 1480 - DNA, 36 bp, Homo sapiens
aatcctccatcagttctgtgctcaaagatccagaca

SEQ ID NO: 1481 - DNA, 500 bp, Homo sapiens
gctgcttgtgacgctacttacaatgaaatagtcacatttgaacgacttcggcctgtcaatcaaaataaaactgtcaaaaaaaataccttctttaaatgcacagtggatgttcctgaggatttgagagaggcgtgtgctaatgaaaatgcacataaagattttaagaaagcagtaggagcatgcagaattttttaccatccagaaacaacacagctaatgatactgtctgccagtgaagcaactgtgaagagagtaaacatcttaagtgacatgcatttgcgaagtattcgtacgaagttgatgcttatgtccagaaatgaagaggccactaagcatttagaatgcacaaaacaacttgcagcagcttttcatgaggaatttgttgtgagagaagatttaatgggcctggcaataggaacacatggtagtaacatccagcaagctaggaaggttcctggagttaccgccattgagctagatgaagatactggaacattcag

SEQ ID NO: 1482 - DNA, 58 bp, Homo sapiens
acataaagattttaagaaagcagtaggagcatgcagaattttttaccatccagaaaca

SEQ ID NO: 1483 - DNA, 500 bp, Homo sapiens
gaattttttaccatccagaaacaacacagctaatgatactgtctgccagtgaagcaactgtgaagagagtaaacatcttaagtgacatgcatttgcgaagtattcgtacgaagttgatgcttatgtccagaaatgaagaggccactaagcatttagaatgcacaaaacaacttgcagcagcttttcatgaggaatttgttgtgagagaagatttaatgggcctggcaataggaacacatggtagtaacatccagcaagctaggaaggttcctggagttaccgccattgagctagatgaagatactggaacattcagaatctacggagagagtgctgatgctgtaaaaaaggctagaggtttcttggaatttgtggaggattttattcaggttcctaggaatctcgttggaaaagtaattggaaaaaatggcaaagttattcaagaaatagtggacaaatctggtgtggttcgagtgagaattgaaggggacaatgaaaat

SEQ ID NO: 1484 - DNA, 165 bp, Homo sapiens
gcaatccatacagcttacttgataatacagaatcagatcagactgcagacactgatgccagcgaatctcatcacagtactaaccgtcgtaggcggtctcgtagacgaaggactgatgaagatgctgttctgatggatggaatgactgaatctgatacagcttcag

SEQ ID NO: 1485 - DNA, 94 bp, Homo sapiens
agtggacaaagccagcaaatgcggcgttcctgtgagcagataccctcaaccagccagctgtcaaaagtatttcaagataaaatccaggccaagc

SEQ ID NO: 1486 - DNA, 500 bp, Homo sapiens
cctggaccttatatcatgtatacaactgtagatgcaaatgggtatctgaaaaatggatcagctggccaactcagccaatccgcacatttagctctccaactaccatacaacgtgcttggtttaggtcggagcgcaaattttcttgaccatctctacgttggtattccccgtccatctggagaaaaatctatacgaaaacaagagtggactgcaatcattccaaattcccagctaattgtcattccataccctcacaatgtccctcgaagttggagtgccaaactgtatcttacaccaagtaatattgttctgcttactgctatagctctcatcggtgtctgtgttttcatcttggcaataattggcattttacattggcaggaaaagaaagcagatgatagagaaaaacgacaagaagcccaccggtttcattttgatgctatgtgacttgcctttaatattacataatggaatggctgttcacttgattagttgaaaca

SEQ ID NO: 1487 - DNA, 500 bp, Homo sapiens
atctggtgaagtatggtttggctgatgtggtagaaaatcctggtatcatcactgatatagggatgaaagcagtcaatgaagttttttcctgtatcaaatatctggcaatttacaattgccctcatctacacaacccatacaattggatctcagaccactcaagatggactcgattggttgatatcaacctagtacggtgccatgctttgaagctggactcttttggccagtttattgaattattacccagcctagagtttatttcactggatcagatgtttcgtgaaccacccaagggttgtgctcgagttggtctgagtgcaggcacaggaattggtgtttcatcagctcttgttagcaaccagaactccaacaatgacgataataatgcccagaataacaatgccaacatccacgacaacaatcaccatcatccagatgactcagacgaggagaatgactttcggcaagatctgcagccaggagagcagcagtttgca

SEQ ID NO: 1488 - DNA, 500 bp, Homo sapiens
gattggttgatatcaacctagtacggtgccatgctttgaagctggactcttttggccagtttattgaattattacccagcctagagtttatttcactggatcagatgtttcgtgaaccacccaagggttgtgctcgagttggtctgagtgcaggcacaggaattggtgtttcatcagctcttgttagcaaccagaactccaacaatgacgataataatgcccagaataacaatgccaacatccacgacaacaatcaccatcatccagatgactcagacgaggagaatgactttcggcaagatctgcagccaggagagcagcagtttgcagctgacgcattaaatgagatggaagacatcgtccaagaagatggagaggtggtggccgagagtggaaataatactccagctcacagccaggcaattattcctgtggatgttgatgaggaacaagcaggacccagtggtcttcagcgtgtagtaaaaccaacctcaattact

SEQ ID NO: 1489 - DNA, 177 bp, Homo sapiens
gaagaagaggatatcacatagcaccaattttaccactcaaaccaggagctactactgtgtaaataggttacaccccagttgaaatctttgcaaaggtcggttctattcagcgaacagcactatagcaaaagaagatcgttccatattgtacgccccattaaattacagtgtttctta

SEQ ID NO: 1490 - DNA, 36 bp, Homo sapiens
agttccacaccctggactcctacgaggacaagcaga

SEQ ID NO: 1491 - DNA, 500 bp, Homo sapiens
catggacccttaggagataatgaagagaggaccagagtatctactgacaaaagacaggtaaagagaactggtcttgtggtggtgaaaaacatgaaaattgttggtctccactgttctagtgaagatttacatgccgggcagattgctcttattaaacatgggtcaaggctgaaaaactgtgatctttatttttccagaaaaccatgttctgcttgtttgaaaatgattgtaaatgctggagttaaccgaatttcatactggcctgctgatccagaaataagtttgcttacggaggcttctagttctgaagatgcaaagttagatgccaaagcagtggaaagattgaagtcaaacagtcgggcccatgtgtgtgtcttacttcaacctttggtgtgttatatggtgcagtttgtagaggagacctcttacaaatgtgactttattcaaaaaattacaaaaacattgccggatgctaacactgacttttattatgaatgtaa

SEQ ID NO: 1492 - DNA, 36 bp, Homo sapiens
gaaggaatggacctcaaaattatggcatcgtcaaag

SEQ ID NO: 1493 - DNA, 36 bp, Homo sapiens
cttggactgcggcgtcgagtcagctgaaagaacact

SEQ ID NO: 1494 - DNA, 32 bp, Homo sapiens
aaagaacactttgcacagttcggccatgtcag

SEQ ID NO: 1495 - DNA, 25 bp, Homo sapiens
tttgcacagttcggccatgtcagaa

SEQ ID NO: 1496 - DNA, 137 bp, Homo sapiens
atggccgacttcgatgatcgtgtgtcggatgaggagaaggtacgcatagctgctaaattcatcactcatgcacccccaggggaatttaatgaagtattcaatgacgttcggctactacttaataatgacaatctcct

SEQ ID NO: 1497 - DNA, 28 bp, Homo sapiens
catggatcagttcacgcctgtgaagata

SEQ ID NO: 1498 - DNA, 36 bp, Homo sapiens
ccgaatggagtctgcactgtaagtcatcagtagcag

SEQ ID NO: 1499 - DNA, 28 bp, Homo sapiens
ttcatcattcatgcccctcctggagaat

SEQ ID NO: 1500 - DNA, 36 bp, Homo sapiens
agagaaaagccatggccgacaagggtgctgaacaag

SEQ ID NO: 1501 - DNA, 307 bp, Homo sapiens
cgagccagcggcagcggcggcggcgatgagacagaagcactaccttgaggctgcagcgcggggactgcacgacagctgcccgggccaagcccgctacctcctctgggcctacacttcgtcgcacgatgataagagcacttttgaagaaacgtgtccatactgtttccagctgttggttctggataactctcgagtgcgtctcaaacccaaagccaggttgacacccaaaatacagaaacttcttaatcgagaagcgagaaactatacactcagttttaaagaagcaaaaatggtgaaaaagttcaaa

SEQ ID NO: 1502 - DNA, 90 bp, Homo sapiens
aactgcacaggcaacctgtgagccataggctgtttcagcaagtcccataccagttctgcaatgtggtatgcagagttggctttcaaagaa

SEQ ID NO: 1503 - DNA, 157 bp, Homo sapiens
gaggtccttatggctgcctttcaaagaaagaagaaaatgatggaagaaaaactgcacaggcaacctgtgagccataggctgtttcagcaagtcccataccagttctgcaatgtggtatgcagagttggctttcaaagaatgtactcgacaccttgcg

SEQ ID NO: 1504 - DNA, 36 bp, Homo sapiens
tctttctatttctaacagaaggcaaccacagaaaaa

SEQ ID NO: 1505 - DNA, 500 bp, Homo sapiens
attaggagaattacacatatctcaggtactttagaagatgaagatgaagatgaagataatgatgacattgtcatgctagagaaaaaaatacgaacatctagtatgccagagcaggcccataaagtctgtgtcaaagagataaagagactcaaaaaaatgcctcagtcaatgccagaatatgctctgactagaaattatttggaacttatggtagaacttccttggaacaaaagtacaactgaccgcctggacattagggcagcccggattcttctggataatgaccattacgccatggaaaaattgaagaaaagagtactggaatacttggctgtcagacagctcaaaaataacctgaagggcccaatcctatgctttgttggccctcctggagttggtaaaacaagtgtgggaagatcagtggccaagactctaggtcgagagttccacaggattgcacttggaggagtatgtgatcagtctgacattcgaggacacag

SEQ ID NO: 1506 - DNA, 500 bp, Homo sapiens
caaaagcatcaagatgacttacaggatgtaatagggagagctgtcgagattggtgttaaaaagtttatgattacaggtggaaatctacaagacagtaaagatgcactgcatttggcacaaacaaatggtatgtttttcagtacagttggatgtcatcctacaagatgtggtgaatttgaaaagaataaccctgatctttacttaaaggagttgctaaatcttgctgaaaacaataaagggaaagttgtggcaataggagaatgcggacttgattttgaccgactgcagttttgtcccaaagatactcaactcaaatattttgaaaaacagtttgaactgtcagaacaaacaaaattaccaatgtttcttcattgtcgaaactcacatgctgaatttttggacataatgaaaagaaatagagatcggtgtgtagggggagtggtgcattcatttgatggtaccaaggaagcagcagctgctttgattgacttggatcttta

SEQ ID NO: 1507 - DNA, 428 bp, Homo sapiens
ggcgtcgagcggcggggagccagggagtttatttgatcaccacgtccagagggcggtatgcgacacacgggccaaatatcgagagggacgacggcctcgtgctgtgaaggtatatacaatcaatttggaatctcagtacttattaatacaaggagttcctgctgtgggagtcatgaaggaattagttgagcgattcgctttatatggtgcaattgaacagtacaatgctctagatgaatacccagcagaagactttactgaagtttatcttattaaatttatgaacttacaaagtgcaaggacagccaagagaaaaatggatgaacagagtttcttcggtggattgcttcatgtgtgctatgctccagaatttgaaacagttgaagaaactagaaaaaaactacaaatgcggaaggcatatgtagtaa

SEQ ID NO: 1508 - DNA, 391 bp, Homo sapiens
gaatctcagtacttattaatacaaggagttcctgctgtgggagtcatgaaggaattagttgagcgattcgctttatatggtgcaattgaacagtacaatgctctagatgaatacccagcagaagactttactgaagtttatcttattaaatttatgaacttacaaagtgcaaggacagccaagagaaaaatggatgaacagagtttcttcggtggattgcttcatgtgtgctatgctccagaatttgaaacagttgaagaaactagaaaaaaactacaaatgcggaaggcatatgtagtaaaaactactgaaaataaagaccattacgtgacaaagaagaaattggttacagagcataaagacacagaggattttagacaagacttccact

SEQ ID NO: 1509 - DNA, 36 bp, Homo sapiens
tctatttctcattctcaggttgagcagttagtcaat

SEQ ID NO: 1510 - DNA, 467 bp, Homo sapiens
ttacacccccagattaccagcctcccggttttaaggatggtgattgtgaaggagttatatttgaaggggaacctatgtatttaaatgtgggagaagtctcaacaccttttcacatcttcaaagtaaaagtgaccactgagagagaacgaatggaaaatattgactcaactatactatcaccaaaacaaataaaaacaccatttcaaaaaatcctgagggacaaagatgtagaagatgaacaggagcattatacaagtgatgatttggacattgaaactaaaatggaagaacaggaaaaaaaccctgcatcttctgaacttgaagaaccaagtttagtttgtgaggaagatgaaattatgaggtctaaagaaagtccagatctttctatttctcattctcaggttgagcagttagtcaataaaacatctgaacttgatatgtctgaaagcaaaacaagaagtggaaaa

SEQ ID NO: 1511 - DNA, 500 bp, Homo sapiens
caattcaaattcaaatacaccaataatggaccactcatggacttcataagtaaaaaccaaagcaacgaatctagcatgttgtctactgacaccaagaaagcaagcattctcctcattcgcaagatttatatcctaatgcaaaatctggggcctttacctaatgatgtttgtttgaccatgaaacttttttactatgatgaagttacacccccagattaccagcctcccggttttaaggatggtgattgtgaaggagttatatttgaaggggaacctatgtatttaaatgtgggagaagtctcaacaccttttcacatcttcaaagtaaaagtgaccactgagagagaacgaatggaaaatattgactcaactatactatcaccaaaacaaataaaaacaccatttcaaaaaatcctgagggacaaagatgtagaagatgaacaggagcattatacaagtgatgatttggacattgaaactaaaatggaagaacaggaaaa

SEQ ID NO: 1512 - DNA, 246 bp, Homo sapiens
gaaaaaaaccctgcatcttctgaacttgaagaaccaagtttagtttgtgaggaagatgaaattatgaggtctaaagaaagtccagatctttctatttctcattctcaggttgagcagttagtcaataaaacatctgaacttgatatgtctgaaagcaaaacaagaagtggaaaagtctttcagaataaaatggcaaatggaaatcaaccagtaaaatcttccaaagaaaatcggaagagaagtcaa

SEQ ID NO: 1513 - DNA, 157 bp, Homo sapiens
ttaaaaagatggacttcagcagaaatctttatgatattggggaacaactggacagtgaagatctggcctccctcaagttcctgagcctggactacattccgcaaaggaagcaagaacccatcaaggatgccttgatgttattccagagactccagga

SEQ ID NO: 1514 - DNA, 486 bp, Homo sapiens
gcaaagatggtggaggaggagaacatccgcgtggttcgttgtggcggcagcgagttgaactttaggagagctgtgttctctgcagattctaagtatatcttctgtgtctctggagactttgttaaagtttacagcacagttacagaagagtgtgtacacatactgcatggacacagaaatctggtgactggaatccagcttaaccccaacaaccatctacagctgtattcttgttcccttgatggcacaattaaactgtgggactatatagatggcatcttaataaagactttcatagttggatgtaaacttcatgccctctttactcttgcccaagctgaggattctgtctttgttatagtgaataaagaaaaaccagatatatttcagctggtttcagtgaaactgccaaaatcctcaagccaggaagtagaagccaaggagctgtcctttgttttggattacataaaccagtcacccaagtgc

SEQ ID NO: 1515 - DNA, 415 bp, Homo sapiens
ggctcaacgaaggaagttcagggcgggaccagagattggccattccgctactgcgcaaagatggtggaggaggagaacatccgcgtggttcgttgtggcggcagcgagttgaactttaggagagctgtgttctctgcagattctaagtatatcttctgtgtctctggagactttgttaaagtttacagcacagttacagaagagtgtgtacacatactgcatggacacagaaatctggtgactggaatccagcttaaccccaacaaccatctacagctgtattcttgttcccttgatggcacaattaaactgtgggactatatagatggcatcttaataaagactttcatagttggatgtaaacttcatgccctctttactcttgcccaagctgaggattctgtctttgttatag

SEQ ID NO: 1516 - DNA, 500 bp, Homo sapiens
tagaggccacttgaaaagacttggaaagacgaaatgggatgctcacaaatctccaatctgtgttctgaatgagatgatgcaaaatgaagaaaaatatgaaaaaatcttaaaggcattgaacagtcgtcgtattattcccagaccatttgtagctcaaaaacttgcatcaagtgatgactttatatctcaaaatgttatacctcttgaagcataccgtaatggcctaaagactgaagctctgtcagtgtctgcatcagaagaagaagggctgaatttcttaaatgaatatgatgaaacaaaaccagaactgcccagtgggaaaaagaatcagtctcttacactcatagaacttcttaaaaataaaaggatgggagaagaaaggaattctgctatttctcctcaaaagatccataatcagacagcaagaaagagattcgttcagaaatgcgttcttccattaaatgaggatagtccgttgatgtatcagccacaaaaaatgg

SEQ ID NO: 1517 - DNA, 452 bp, Homo sapiens
ctggaccttttgtcagtaaccattgaaggtccatcccattattcatcaaatagtgaaggatcatgttctgtgttcagttctcccaaaactccaggaggcttttcaccaggcattcctttccaaactgaagagggccgacgggatgacagtttgtcttctaccagtgaagattccgagaaggatgaaaaagatgaagaccatgagagggaaaggttttatatttacaggaaaccctcacatacgtctcgtaaaaaagcaacaggctttgctgctgttcatcagctatttacagaacgctggccaacaacaccagtcaatagaagtcttagtggcacagctacagagagaaatattgactttgaacttgatatacgggttgaaattgatagtggaaaatgtgtactccacccaaccacccttctacaagaacatgatgatataagtttgagaag

SEQ ID NO: 1518 - DNA, 500 bp, Homo sapiens
tctgtggctgtgaatgacattagaagagatgttcgtaaaaaattacggaggtccagtatgcgggctgcttccctaaaggataagtggggtttgagttacaaaccaagttacagccgatcaaaaagcatttctgcttctggaagaccacctcttaagcgaatggaaagggcaagttctcgagtaggagaaactgaagagctcccagaaatccgtgtggatgcagcatctcctggacctagagtaacttttaatatccaggatacatttccagaggagacagaactggaccttttgtcagtaaccattgaaggtccatcccattattcatcaaatagtgaaggatcatgttctgtgttcagttctcccaaaactccaggaggcttttcaccaggcattcctttccaaactgaagagggccgacgggatgacagtttgtcttctaccagtgaagattccgagaaggatgaaaaagatgaagaccatgagagggaaaggtttta

SEQ ID NO: 1519 - DNA, 36 bp, Homo sapiens
tgaattgaggcaacagttgcaacagaagcagcagta

SEQ ID NO: 1520 - DNA, 36 bp, Homo sapiens
agtgacaaagacattgaggcccagatagctaataac

SEQ ID NO: 1521 - DNA, 36 bp, Homo sapiens
gtttaatgaaaatttaagagatgctgttcagttaaa

SEQ ID NO: 1522 - DNA, 36 bp, Homo sapiens
gactggaagaagcccaaggtaatggtgactagctct

SEQ ID NO: 1523 - DNA, 140 bp, Homo sapiens
gatgaaaatccagattttagagagaaaattatagcaatcaacagcgaactcacccaacctaaactggctctcagtgaagaagataaagaggtgatcatagattctaccaatattatattccactgtgcagctacagtaag

SEQ ID NO: 1524 - DNA, 437 bp, Homo sapiens
gagagcgcgacggcggcggcggcggcggcgcagctattgctggacggccagtgggagagcgaggcctgagcctctgcgtctaggatcaaaatggtttcaatcccagaatactatgaaggcaagaacgtcctcctcacaggagctaccggttttctagggaaggtgcttctggaaaagttgctgaggtcttgtcctaaggtgaattcagtatatgttttggtgaggcagaaagctggacagacaccacaagagcgagtggaagaagtccttagtggcaagctttttgacagattgagagatgaaaatccagattttagagagaaaattatagcaatcaacagcgaactcacccaacctaaactggctctcagtgaagaagataaagaggtgatcatagattctaccaatattatattccactgtgcagctacagtaag

SEQ ID NO: 1525 - DNA, 36 bp, Homo sapiens
atcaaaaccagagaattggtgaaaatcagaaggcag

SEQ ID NO: 1526 - DNA, 36 bp, Homo sapiens
ttgaaaaccagcataaaggtacaagttccccatgtg

SEQ ID NO: 1527 - DNA, 463 bp, Homo sapiens
aaatattttgtgaaacttctcagaagttggtgagtgtggaagcctttgctctggctgcgaaatactattctgtacaaaacttgggaatatgtactccttttgaacagttgcttgtagcccttcgaggaaatcaaaaccagagaattggtgaaaatcagaaggcagttgagtttatgaatatgaagaaatctcatgaagttcaggcaatgtcagagctgattagcagtattgctgactactatggaataaagcaggtgattgacttgggttccggtaaaggctacctaagctcttttttgtccttgaagtatggcttaaaagtttatggaattgattcttcaaataccaatactcatggagctgaggagagaaacagaaaattgaagaaacattggaaactctgtcatgctcagtcaagattagatgtcaatggactagcattaaaaatggcaaaagaaaggaa

SEQ ID NO: 1528 - DNA, 500 bp, Homo sapiens
ttgagtttatgaatatgaagaaatctcatgaagttcaggcaatgtcagagctgattagcagtattgctgactactatggaataaagcaggtgattgacttgggttccggtaaaggctacctaagctcttttttgtccttgaagtatggcttaaaagtttatggaattgattcttcaaataccaatactcatggagctgaggagagaaacagaaaattgaagaaacattggaaactctgtcatgctcagtcaagattagatgtcaatggactagcattaaaaatggcaaaagaaaggaaagtgaaaaataaagttaaaaataaagctgatactgaggaagtgtttaacaacagtcctacaaatcaagaaaagatgcctacctcagctattttgcctgatttttctggctctgtaatttctaatatcagaaaccaaatggaaacccttcattctcagccacatcaagaagaaaatttgtgttttgaaaattccttttctctt

SEQ ID NO: 1529 - DNA, 112 bp, Homo sapiens
ctccacacttgtggtgatctggctccaaatactttgcgaatatttacctccaactctgaaatcaagggagtttgcagtgtgggttgttgctaccacctcttatctgaagaat

SEQ ID NO: 1530 - DNA, 36 bp, Homo sapiens
tgcattttcttttcacaggcccagtgcttttacaac

SEQ ID NO: 1531 - DNA, 108 bp, Homo sapiens
tttatctcgccattaatagtgagggaaatattctctctcgtgctaaggagacaggctcacatattgagggagtgaccggtgcccgcgagacagaaagaacaatgtcag

SEQ ID NO: 1532 - DNA, 500 bp, Homo sapiens
taaactttataaacattcaagtacttcctcgcgtattgctaaaggaggagttgaccacaccaaaatgagtctacatggtgctagtgggggacatgagagatcaagagatagacgaaggtcaagtgacagatcacgagattcatctcatgaaagaacggagtcccagctcactccttgtattagaaatgtgacttctccaacacgacagcaccatgttgaacgagaaaaagatcacagttcctctcgtccaagcagtccgcgtcctcaaaaagcatccccaaatggttccattagcagtgctgggaacagcagcagaaacagtagtcagtcaagttcagatggtagctgtaagacagctggggagatggtgtttgtatatgaaaatgcaaaagaaggagctcggaatataagaacgtcagaacgagtgacactaatagtggataacactagatttgttgtagacccatccatttttactgcacagccaaatacaatgttgg

SEQ ID NO: 1533 - DNA, 500 bp, Homo sapiens
ataatccgttgtcctgatggcatatctattcctgaactgagagaagcatgtgactatctttgtatctcttttgaatatagcactattaaatgtagagatctcagtgccctaatgcatgagttatcaaatgatggtgctcgtagacaatttgaattttatctggaagaaatgatcctccctctcatggtagctagtgcccagagtggggaacgggaatgtcatatagtggtgcttacagatgatgatgtggttgattgggatgaagaatatccaccacagatgggagaagaatattcacaaattatttatagcacaaaattatatagatttttcaagtatattgaaaacagagatgtggccaagtcagttttgaaggagaggggtcttaagaagattagattgggaatagaaggttatcctacctacaaagaaaaagtaaagaaaaggcctggaggccgcccagaagtgatctacaactatgtccaaagaccctttattcg

SEQ ID NO: 1534 - DNA, 500 bp, Homo sapiens
tatcaaatgatggtgctcgtagacaatttgaattttatctggaagaaatgatcctccctctcatggtagctagtgcccagagtggggaacgggaatgtcatatagtggtgcttacagatgatgatgtggttgattgggatgaagaatatccaccacagatgggagaagaatattcacaaattatttatagcacaaaattatatagatttttcaagtatattgaaaacagagatgtggccaagtcagttttgaaggagaggggtcttaagaagattagattgggaatagaaggttatcctacctacaaagaaaaagtaaagaaaaggcctggaggccgcccagaagtgatctacaactatgtccaaagaccctttattcgaatgtcctgggagaaggaagaaggaaagagtcggcatgtagactttcagtgtgtaaagagtaaatctatcaccaatcttgcagcagctgcagcagacattccccaggaccagctggtagtc

SEQ ID NO: 1535 - DNA, 162 bp, Homo sapiens
tatcaaatgatggtgctcgtagacaatttgaattttatctggaagaaatgatcctccctctcatggtagctagtgcccagagtggggaacgggaatgtcatatagtggtgcttacagatgatgatgtggttgattgggatgaagaatatccaccacagatgg

SEQ ID NO: 1536 - DNA, 36 bp, Homo sapiens
gagctccataagctaaagcttgccgaactaaagcaa

SEQ ID NO: 1537 - DNA, 36 bp, Homo sapiens
gaaataccacagactgagagaatgcagaagagggct

SEQ ID NO: 1538 - DNA, 250 bp, Homo sapiens
gaagaggaggcaaatgaagaagatgtactgggagatgaaacagaggaagaagaaacaaagcccattgagctccctgtcaaagaggaagaaccccctgaaaaaactgttgatgtggcagcagagaagaaagtggtgaaaattacatctgaaataccacagactgagagaatgcagaagagggctgaacgattcaatgtacctgtgagcttggagagtaagaaagctgctcgggcagctaggtttgggattt

SEQ ID NO: 1539 - DNA, 401 bp, Homo sapiens
gaggggtaacaagatggcgaccgagacggtggagctccataagctaaagcttgccgaactaaagcaagaatgtcttgctcgtggtttggagaccaagggaataaagcaagatcttatccacagactccaggcatatcttgaagaacatgctgaagaggaggcaaatgaagaagatgtactgggagatgaaacagaggaagaagaaacaaagcccattgagctccctgtcaaagaggaagaaccccctgaaaaaactgttgatgtggcagcagagaagaaagtggtgaaaattacatctgaaataccacagactgagagaatgcagaagagggctgaacgattcaatgtacctgtgagcttggagagtaagaaagctgctcgggcagctaggtttgggattt

SEQ ID NO: 1540 - DNA, 64 bp, Homo sapiens
gaatgtcttgctcgtggtttggagaccaagggaataaagcaagatcttatccacagactccagg

SEQ ID NO: 1541 - DNA, 500 bp, Homo sapiens
aagaagatgtactgggagatgaaacagaggaagaagaaacaaagcccattgagctccctgtcaaagaggaagaaccccctgaaaaaactgttgatgtggcagcagagaagaaagtggtgaaaattacatctgaaataccacagactgagagaatgcagaagagggctgaacgattcaatgtacctgtgagcttggagagtaagaaagctgctcgggcagctaggtttgggatttcttcagttccaacaaaaggtctgtcatctgataacaaacctatggttaacttggataagctgaaggaaagagctcaaagatttggtttgaatgtctcttcaatctccagaaagtctgaagatgatgagaaactgaaaaagaggaaggagcgatttgggattgtcacaagttcagctggaactggaaccacagaggatacagaggcaaagaagaggaaaagagcagagcgctttgggattgcctgatgaagagttcctgatactttc

SEQ ID NO: 1542 - DNA, 36 bp, Homo sapiens
cgactaagaggcgaaaacgtaaattgcttttatatt

SEQ ID NO: 1543 - DNA, 500 bp, Homo sapiens
gcggcggtgtctggccaggcggtaggcgctgcctggccgcggcggggaagatgttcagcgtagagtcgctggagcgggcggagctgtgcgagagcctcctcacttggatccagacatttaatgtggatgcaccatgccagaccgtggaagatttaacgaatggggttgtgatggcccaggttcttcaaaagatagatcctgcatattttgatgaaaattggctaaacagaatcaaaactgaagtaggagataattggaggctaaagataagcaatttaaagaaaattttaaaaggaatcttggattataatcatgagattttaggacagcaaattaatgactttacccttcctgatgtgaaccttattggggagcattctgatgcagcagagcttggaaggatgcttcagctcatcttaggctgtgctgtgaactgtgaacagaagcaagagtacatccaagccattatgatgatggaggaatctgttcaacatgttgtc

SEQ ID NO: 1544 - DNA, 500 bp, Homo sapiens
atgaaggaggtgtagacttgaacagcatccaggatcctgatgagaaggtagccatgcttacgcaaatcttggaatttgggcagacaccaaaacaactatttgtgacaccacatcctcgaaggatcaccccaaagtttaaaagtttgtcccagacctccagttataatgcttctatggcagattccccaggtgaagagtcttttgaagacctgaccgaagaaagcaaaacactggcctggaataacatcaccaaactgcagttacacgagcactataaaatccacaaagaagcagttactggaatcacggtctctcgcaatggatcttcagtattcacaacatcccaagattccaccttgaagatgttttctaaagaatcaaaaatgctacaaagaagtatatcattttcaaatatggctttatcgtcttgtttacttttaccaggagatgccactgtcataacttcttcatgggataataatgtctatttttattccata

SEQ ID NO: 1545 - DNA, 25 bp, Homo sapiens
cggtctctcgcaatggatcttcagt

SEQ ID NO: 1546 - DNA, 88 bp, Homo sapiens
atttggaagacgccaggacacgttaatgggacatgatgatgctgttagtaagatctgttggcatgacaacaggctatattctgcatcg

SEQ ID NO: 1547 - DNA, 36 bp, Homo sapiens
gacaatgagatgtttgaggtgtgcaaagtcctgtgg

SEQ ID NO: 1548 - DNA, 36 bp, Homo sapiens
aaaatatatatgaagttggtaggtgtctcaaataag

SEQ ID NO: 1549 - DNA, 39 bp, Homo sapiens
gacgtcagaacacatacattatggacaaaggcttcaaag

SEQ ID NO: 1550 - DNA, 28 bp, Homo sapiens
ctctgaatggcgtctttaccaacacaat

SEQ ID NO: 1551 - DNA, 279 bp, Homo sapiens
ctggcaaagtggcggcgctcagaaggcctgccctcagagtgcagatccgtcacagactaaggagatggcaggcattgacagcttcactccatgaaggccatctctgtttctctcctccgcttaaccaagctgttgtggtttttcagcatagtgttgtatgttccattgctagctgtcctgctgtttaacacagtgttgtattttttttctaaatgtacataattagaaaagaaaataacaataggaagctatgtgtatcttctgtgtaaagcagtggct

SEQ ID NO: 1552 - DNA, 36 bp, Homo sapiens
tattagacaccatcgtgttcatactggagagaaacc

SEQ ID NO: 1553 - DNA, 117 bp, Homo sapiens
ctatgaatgtagtgaatgtgggaaagcctttagccagaggtcacaccttgttacacaccagaaaatccatactggagagaagccctatcagtgcactgaatgtgggaaagccttcag

SEQ ID NO: 1554 - DNA, 177 bp, Homo sapiens
atgtagcaaatgtgggaaatcttttaggggcagctcagatcttattagacaccatcgtgttcatactggagagaaaccctatgaatgtagtgaatgtgggaaagcctttagccagaggtcacaccttgttacacaccagaaaatccatactggagagaagccctatcagtgcactga

SEQ ID NO: 1555 - DNA, 36 bp, Homo sapiens
ctggagggacaaacgcaggttgcagaaaatcctcac

SEQ ID NO: 1556 - DNA, 26 bp, Homo sapiens
tcctcactctgagtacggtctcacag

SEQ ID NO: 1557 - DNA, 500 bp, Homo sapiens
gtcaagaagaactgatggagatatctgaagttgacgagggattttattccagggctgcgtctagtaccagccagtcgggtttatcaaacagtagtcacaattgtagtaacaagccaagtataggaaagaaccacagacggtcaggaggaagcaaaactggaggaaaagaaaaagaaactacaggggaatcttgcaaagatcactttgctcgaaaacaaactcagagagcccaaagtgagaatcttgagcttctctctttgaagagacttactttaacaaccagccaatccctacctaagcctagtagccatggtttggctaagaccgcagcgactgtatttagtaaatcctttgaacaagtcagtggtgtcacagtcccacataacccgtcatctgctgttggttgtggggctgggacagatgccaataggttttccgcttgtagtctccaagaagaaaagcttatttacgtttcagaaagaactgaacttccaatgaag

SEQ ID NO: 1558 - DNA, 500 bp, Homo sapiens
gcttcattgcctcatggtcccatgaaatctaataaggaaggtacaaggtgtattcaagttgaaatcacaccaacttcctctcgaatatcaagaaatgcagtaaccagcatgtcaataaggggtcataggtggaaaagacatggaaatacagaattaacaggtcaagaagaactgatggagatatctgaagttgacgagggattttattccagggctgcgtctagtaccagccagtcgggtttatcaaacagtagtcacaattgtagtaacaagccaagtataggaaagaaccacagacggtcaggaggaagcaaaactggaggaaaagaaaaagaaactacaggggaatcttgcaaagatcactttgctcgaaaacaaactcagagagcccaaagtgagaatcttgagcttctctctttgaagagacttactttaacaaccagccaatccctacctaagcctagtagccatggtttggctaagaccgcagcgactgtatt

SEQ ID NO: 1559 - DNA, 500 bp, Homo sapiens
aatatatacaagaaattgagaagcatttattcaagaactactaatccttggtgagaacaatggaagtgtgtggtaatttaaccaggagcagctttcatttcctcccatccagcaagtctgcatgggctgtcagtctgattcatgatttgaaggagagcaggaataaatgcctgtccaaggataataaaataaatacataccatcatggtggtaaacagtgagggaaaactgacatcaccagcttggggataaaatactggttaggggaagcagcagactaacaacagaccagtcaaatttttaacagggaacaggatcaccatagtgagccttagcaagctttctcatgtccccagtgatctgtagactgcttgtacaaggctatacacaaactcaggagaaaccaaagtgggctttagcactttattcttccctagttgaaggtgaagccttgcatgtgcagaaagtaaaagccagggtaggcttgtaacctgcccaaa

SEQ ID NO: 1560 - DNA, 36 bp, Homo sapiens
aaagcacttgacacaaagattggacggtacaaagca

SEQ ID NO: 1561 - DNA, 500 bp, Homo sapiens
gcaacgagctccaggacatagagaagattatggctcagattgaaaggggagaggcgagaattcaaagaagaataagcatcaagaaagcacttgacacaaagattggacggtacaaagcaccttttcatcagctgagaatatcatatggtactaacaaaggaaaaaactatactgaagaagaagatcgttttctgatttgtatgcttcacaaacttggatttgacaaagaaaatgtttatgatgaattgcgacagtgtattcgcaactctcctcagttcagatttgactggtttcttaagtccagaactgcaatggagctccagaggagatgtaataccttaattactttgattgaaagagaaaacatggaactagaagaaaaggagaaggcagagaaaaagaaacgaggaccaaagccttcaacacagaaacgtaaaatggatggcgcacctgatggtcgaggaagaaaaaagaagctgaaactatgaatatgtttttgt

SEQ ID NO: 1562 - DNA, 500 bp, Homo sapiens
ccttttcatcagctgagaatatcatatggtactaacaaaggaaaaaactatactgaagaagaagatcgttttctgatttgtatgcttcacaaacttggatttgacaaagaaaatgtttatgatgaattgcgacagtgtattcgcaactctcctcagttcagatttgactggtttcttaagtccagaactgcaatggagctccagaggagatgtaataccttaattactttgattgaaagagaaaacatggaactagaagaaaaggagaaggcagagaaaaagaaacgaggaccaaagccttcaacacagaaacgtaaaatggatggcgcacctgatggtcgaggaagaaaaaagaagctgaaactatgaatatgtttttgtttcataatcactaactttaaaccagtagttctttaatttacgggtcttcataagatgtactgtacaatgctcaattgttatgtcatttaaagacatcaggttcatctgtttactgagct

SEQ ID NO: 1563 - DNA, 341 bp, Homo sapiens
aaatcttcaactcgccacaggctaccaccactccctatggctttgcaaaattaaagatttagaagaaggatggggcggtggaagctatgaaaagaggcaggaaaaaagttcctttgacccgatgctgtcagagagcgtgcatgaagaagaaagttaatggtatttccatttatataagaagcgcctaagaaatgcctgtgacgttcgtgaactagtgattgtgaattccaaatttgatgccaactttatgtgtaaagaagctaactcctgccaacatcgtggctgaatgaacagctgggactatgcttaacccattcccagcttataaaagccccatggca

SEQ ID NO: 1564 - DNA, 500 bp, Homo sapiens
aatccaaggaatcaatgccaagttggggaatttccaaagaagaattattccaggtagtatcagtggaaaaacacattcaagatgtgctgcagttctcgaagttgaaagcagcctgcggttgtgatggccagttagagatgcagcagataaaacaggagagacacctgaaacaaatgtcaaccattcacaaatctgccaccacccttagcagagattataaatggaatggatttgggagaagcttaggtttaagatcagtccttgttaaccaacacagcattctcatgggagaaggatcttataaatgtgatacagaattcaggcagactttagggggaaacaactctcagagaacccacccagaaaagaaatcttgtaaatgtaatgagtgtgggaagtcctttcacttccagtcagaacttaggcgccatcagcgatgtcacactggagaaaagccgtatgaatgcagtgactgtggaagagcctttggtcatatttca

SEQ ID NO: 1565 - DNA, 500 bp, Homo sapiens
ccaagactcgtgccattcccgagggaatctttgtcggcatcctggtcactgtgggggtttgaggtcgtcccggaagacttcagaaccaggcgaacctagacgaaggcggctggaatgaaccaggttaacattcaagatggtacatgctgaagccttttctcgtcctttgagtcggaatgaagttgttggtttaattttccgtttgacaatatttggtgcagtgacatactttactatcaaatggatggtagatgcaattgatccaaccagaaagcaaaaagtagaagctcagaaacaggcagaaaaactaatgaagcaaattggagtgaaaaatgtgaagctctcagaatatgaaatgagtattgctgctcatcttgtagaccctcttaatatgcatgttacttggagtgatatagcaggtttagatgatgtcattacggatctgaaagacacagtcatcttacctatcaaaaagaaacatttgtttgagaattccaggc

SEQ ID NO: 1566 - DNA, 500 bp, Homo sapiens
aatagatgattctgatgatgaaattgaggaattcatggtaacttctgaaaatttaaccgaaggaataaaattaagagcctcaaaatcagtttccaatggaacagctaagcctgccacttctgagaactttgatgaagatttgaagtgggtagaagaaaatattccctcttcattcacagatgtagctcttccagtgttagtggattcagatgaggaaatcatgaccagatctgaaatggctgaaaaaatgttctcttcagaaaagataatgtgattggaacccgtataagaaatgtagttaagcctgaaggactatccttcatcaagactgaaagtgagctttgatttgatattgcctaaaaatttttattgtgttatcttggaagtctgtgtatcaaaatgaagaattcagatggtaggaggttctatagtccttttaaagctgactcttgagtgtcagttgaatatccattaagttggatttggaaataacctgagga

SEQ ID NO: 1567 - DNA, 108 bp, Homo sapiens
ctctacagaagaatgcaatcaagtgatggcttttcctttagaatttgaatatggaggctacaggaacagatgaagttgacaagctaaaaaccaaatttatatctgctt

SEQ ID NO: 1568 - DNA, 358 bp, Homo sapiens
gggagcggagacggagaacaggttatgtgggagccggcgggggcatttgccggcgacacccgagcgggggccggaagtggggccacagctcgcagcaggagctccgggctagaccgtggcgccggcagcggcccctgggctggaggaggatgatgaggagcgacggaagcgacgcgggggtacgctgctgcgcggcgcccggtttcgtgcccgcggccgactgcgcagcctgtccgcgagtctgagatacttacagagagctacaatggaaaagtcctggatgctgtggaactttgttgaaagatggctaatagccttggcttcatggtcttgggctctctgccgtatttctctttta

SEQ ID NO: 1569 - DNA, 500 bp, Homo sapiens
aaggagaagcccctcccctcgccgagaaaggcatcggagcaagagtccaagacgtcaccgcagcaggtcccgagatcggcggcacagatcccgttccaagtccccaggtcatcaccgtagtcacagacacaggagccactcaaagtctcccgaaaggtctaagaagagccacaagaagagccggagagggaatgagtaatggactcagtttggttttagtccacatggcctcctgtggatatgaggatatctgtatgtggaaggattaagatctcccccaggcagctataagaatattttagtttttttcttatcaagtttctcaacctttatttttaatgaaggaggtgctgagttttgtatctttttaatcataatcaacatcagtttttgacccaactaaccttgactgtattcaaacttatgagagtataaaggatctggaggttggggatatgactgacaaggaaaggctgtggccacctgatgaccctttccct

SEQ ID NO: 1570 - DNA, 36 bp, Homo sapiens
tattgctgcaaaatttgggtatggcttcaagttcat

SEQ ID NO: 1571 - DNA, 36 bp, Homo sapiens
gttattgcatacattcgagacttggctttggaatac

SEQ ID NO: 1572 - DNA, 36 bp, Homo sapiens
gtatttgaacaaactgaggcagctgctagagaagaa

SEQ ID NO: 1573 - DNA, 244 bp, Homo sapiens
atccttgctaatggagggagcctgtcacatcaccatggagtgggcaagttacggaagcaatggctaaaggaaagtatctctgatgtcggctttgggatgctgaagtctgtcaaggaatatgtggaccccaataacatctttggaaacagaaaccttttataaatccattagtaccattacaaaaaaatgtcaattttttttttaagttttcaactgtggttatactagtaatcaaatatatcat

SEQ ID NO: 1574 - DNA, 36 bp, Homo sapiens
atgagctggcacaacaaggatcttctctagcccaaa

SEQ ID NO: 1575 - DNA, 36 bp, Homo sapiens
ttgactttttccttgtagcatcagcgagagctttct

SEQ ID NO: 1576 - DNA, 500 bp, Homo sapiens
caatccgaggagcaggagatggaatggaaactgaggaaccacctaaatctgttgaagttacctccggagtccaatctagaaagcatcatagtcttcagagtccatggaagaaagcagttccatcagagagcccaggagttcttcagctagggaaaatgctcactgaaaaagcaatggaagttaaagctgtaagaatattagttcccaaagctgctataactcatgatatccccaacaaaaatacaaaggttaagtctctgggacatcataaaggagaattccttggtcagtcagagggagttatagaacctaataaggaactctcagaggtaaagaatgtattggaaaagctcaagaattctgaaagaaggttactacaggacaaagaaggtctttcaaaccagctccgtgtacagacagaggtaaatcgtgagttaaaaaagttactggtggcttctgttggggatgatcttcagtatcactttgaacgtctagcccgt

SEQ ID NO: 1577 - DNA, 500 bp, Homo sapiens
agcaggtttctacattaaaatgtcaaaatgaacagctccagacggcagtcacacagcaagtatcacagatccagcagcacaaagaccagtataatcttcttaaaatacagctaggaaaagacaatcagcatcaaggttcttacagtgagggggctcagatgaatggcattcagccagaagaaattggtagattgcgagaagagatagaagaattaaaacgtaatcaggaacttttacaaagccagctgactgaaaaggactctatgattgaaaatatgaaatcttcccaaacatctggcacaaatgaacagtcttcagcaatagtttcagctagagattctgaacaagttgcagaattaaaacaggaactggcaactttaaagtctcagttaaactcacaatctgtggagatcaccaaactacagacagaaaagcaggaactgttacagaaaacagaagcgtttgcaaaatcagttgaggtacaaggagagaccgagact

SEQ ID NO: 1578 - DNA, 72 bp, Homo sapiens
caaggagagaccgagactataatagccaccaaaactactgatgtagaaggaagactgtcagcattattacaa

SEQ ID NO: 1579 - DNA, 500 bp, Homo sapiens
ttaaaatacagctaggaaaagacaatcagcatcaaggttcttacagtgagggggctcagatgaatggcattcagccagaagaaattggtagattgcgagaagagatagaagaattaaaacgtaatcaggaacttttacaaagccagctgactgaaaaggactctatgattgaaaatatgaaatcttcccaaacatctggcacaaatgaacagtcttcagcaatagtttcagctagagattctgaacaagttgcagaattaaaacaggaactggcaactttaaagtctcagttaaactcacaatctgtggagatcaccaaactacagacagaaaagcaggaactgttacagaaaacagaagcgtttgcaaaatcagttgaggtacaaggagagaccgagactataatagccaccaaaactactgatgtagaaggaagactgtcagcattattacaagagaccaaagagttaaagaatgaaattaaagctctgtctgaggaa

SEQ ID NO: 1580 - DNA, 36 bp, Homo sapiens
gagtacctgttattaaagtggcaaatgacaatgctc

SEQ ID NO: 1581 - DNA, 36 bp, Homo sapiens
gcagcagtgccaatacaggactaattgtcagcctag

SEQ ID NO: 1582 - DNA, 455 bp, Homo sapiens
tgttgaagggctccatgccattgttgtgtcagatagagatggagtacctgttattaaagtggcaaatgacaatgctccagagcatgctttgcgacctggtttcttatccacttttgcccttgcaacagaccaaggaagcaaacttggactttccaaaaataaaagtatcatctgttactataacacctaccaggtggttcaatttaatcgtttacctttggtggtgagtttcatagccagcagcagtgccaatacaggactaattgtcagcctagaaaaggaacttgctccattgtttgaagaactgagacaagttgtggaagtttcttaatctgacagtggtttcagtgtgtaccttatcttcattataacaacacaatatcaatccagcaatctttagactacaataatacttttatccatgtgctcaagaaagggcccctttttccaactta

SEQ ID NO: 1583 - DNA, 500 bp, Homo sapiens
tataaaaagttaccaagtgttgaagggctccatgccattgttgtgtcagatagagatggagtacctgttattaaagtggcaaatgacaatgctccagagcatgctttgcgacctggtttcttatccacttttgcccttgcaacagaccaaggaagcaaacttggactttccaaaaataaaagtatcatctgttactataacacctaccaggtggttcaatttaatcgtttacctttggtggtgagtttcatagccagcagcagtgccaatacaggactaattgtcagcctagaaaaggaacttgctccattgtttgaagaactgagacaagttgtggaagtttcttaatctgacagtggtttcagtgtgtaccttatcttcattataacaacacaatatcaatccagcaatctttagactacaataatacttttatccatgtgctcaagaaagggcccctttttccaacttatactaaagagctagcatatagatgtaat

SEQ ID NO: 1584 - DNA, 461 bp, Homo sapiens
cattgttgtgtcagatagagatggagtacctgttattaaagtggcaaatgacaatgctccagagcatgctttgcgacctggtttcttatccacttttgcccttgcaacagaccaaggaagcaaacttggactttccaaaaataaaagtatcatctgttactataacacctaccaggtggttcaatttaatcgtttacctttggtggtgagtttcatagccagcagcagtgccaatacaggactaattgtcagcctagaaaaggaacttgctccattgtttgaagaactgagacaagttgtggaagtttcttaatctgacagtggtttcagtgtgtaccttatcttcattataacaacacaatatcaatccagcaatctttagactacaataatacttttatccatgtgctcaagaaagggcccctttttccaacttatactaaagagctagcatatagatg

SEQ ID NO: 1585 - DNA, 41 bp, Homo sapiens
tgttgaagggctccatgccattgttgtgtcagatagagatg

SEQ ID NO: 1586 - DNA, 500 bp, Homo sapiens
cagagcatgctttgcgacctggtttcttatccacttttgcccttgcaacagaccaaggaagcaaacttggactttccaaaaataaaagtatcatctgttactataacacctaccaggtggttcaatttaatcgtttacctttggtggtgagtttcatagccagcagcagtgccaatacaggactaattgtcagcctagaaaaggaacttgctccattgtttgaagaactgagacaagttgtggaagtttcttaatctgacagtggtttcagtgtgtaccttatcttcattataacaacacaatatcaatccagcaatctttagactacaataatacttttatccatgtgctcaagaaagggcccctttttccaacttatactaaagagctagcatatagatgtaatttatagatagatcagttgctatattttctggtgtagggtctttcttatttagtgagatctagggataccacagaaatggttcagtctatcacag

SEQ ID NO: 1587 - DNA, 39 bp, Homo sapiens
actgaattttttgatcaaggagacagagagagaaaagaa

SEQ ID NO: 1588 - DNA, 36 bp, Homo sapiens
aggccctgctgccacgttgtatgccccagaaggtac

SEQ ID NO: 1589 - DNA, 500 bp, Homo sapiens
caacagcttttagcaacagatccaaacaacttcgaaggcaaatgtggtggcgtggatgcaaaataaaagccatcatggctttggttgctgctatccttttgctagtgattatcattcttatagtcatgaaataccgtacttgatttgatgacagagatcttcattaaacaagatctgggacagtaataaaagattgctgcataatttaaatgaaacctatgtgtatataactttcaaaacttctttttcaagaaactaagagctcagatcatcctgcacttgaaaaatgaagttttaccaccatcaaaactatcattatttaacaacaagtgaagatcaacagaaaaattcaagtagctttgcaaatactagttgatactcagtgaaatcacgtcactattttgatgcctgaatccatacctttgtgatttatgtttaattacagaagcctattgccttgcagcaattttgttgttataatactgattaattggttactc

SEQ ID NO: 1590 - DNA, 500 bp, Homo sapiens
ttggttgctgctatccttttgctagtgattatcattcttatagtcatgaaataccgtacttgatttgatgacagagatcttcattaaacaagatctgggacagtaataaaagattgctgcataatttaaatgaaacctatgtgtatataactttcaaaacttctttttcaagaaactaagagctcagatcatcctgcacttgaaaaatgaagttttaccaccatcaaaactatcattatttaacaacaagtgaagatcaacagaaaaattcaagtagctttgcaaatactagttgatactcagtgaaatcacgtcactattttgatgcctgaatccatacctttgtgatttatgtttaattacagaagcctattgccttgcagcaattttgttgttataatactgattaattggttactccttcttattataactcagtaatacctgtggtcatttggttcctctatcctgacaaagttcactggaaattgccctcagat

SEQ ID NO: 1591 - DNA, 55 bp, Homo sapiens
gcactatagtgatgaactgcagtctgtcatctcacatcttcttcgagtcagagct

SEQ ID NO: 1592 - DNA, 36 bp, Homo sapiens
atctaaagaacgaaattaccacactctgtaaacaga

SEQ ID NO: 1593 - DNA, 339 bp, Homo sapiens
gttgcttggccattgagatttcgcatcctgcatgaaattgcccttggtgtaaattacctgcacaatatgactcctcctttacttcatcatgacttgaagactcagaatatcttattggacaatgaatttcatgttaagattgcagattttggtttatcaaagtggcgcatgatgtccctctcacagtcacgaagtagcaaatctgcaccagaaggagggacaattatctatatgccacctgaaaactatgaacctggacaaaaatcaagggccagtatcaagcacgatatatatagctatgcagttatcacatgggaagtgttatccagaaaacagcct

SEQ ID NO: 1594 - DNA, 166 bp, Homo sapiens
aaaatggaagccagattatgacagtgccgcttctgaatatggaaaagcagctgttgcttttaaaaatgccaaacagtttgagcaagcaaaagatgcctgcctgagggaagctgttgcccatgaaaataatagggctctttttcatgctgccaaagcttatgagcaa

SEQ ID NO: 1595 - DNA, 500 bp, Homo sapiens
ctctattcagaaagaaaaaaatatttataaggaaattgagaattatccaacttgttataagaaaacaattgctcaagtcttagttcatctacacagaaatgactatgtagctgcagaaagatgtgtccgggagagctatagcatccctgggttcaatggcagtgaagactgtgctgccctggaacagcttcttgaaggttatgaccagcaagaccaagatcaggtgtcagatgtctgcaactcaccgcttttcaagtacatggacaatgattatgctaagctgggcctgagtttggtggttccaggagggggaatcaagaagaaatcacctgcaacaccacaggccaagcctgatggtgtcactgccacggctgctgatgaagaggaagatgaatactcaggaggactatgctagtattttgcttgctgaaaagaaaagggaaacaaaggtaaaatcctgacatgccatttcaaggacttgggaatagattagggatatc

SEQ ID NO: 1596 - DNA, 94 bp, Homo sapiens
cagtgaagactgtgctgccctggaacagcttcttgaaggttatgaccagcaagaccaagatcaggtgtcagatgtctgcaactcaccgcttttc

SEQ ID NO: 1597 - DNA, 150 bp, Homo sapiens
gagaattctgggacatagttgcaataacagcggctgatgaaaaacaggaacttgcttacaaccaacagctgtcagaaaagctgaaaagaaaggagttaccccttggagttcaatatcacgtttttgtggatcctgctggagccaaaattg

SEQ ID NO: 1598 - DNA, 152 bp, Homo sapiens
tttgtgcccttcaatgtttggaaaagctatatggagataaatggaattcttttaccatcttattaattcactctggtggctacagtcaacgacttccaaatgcaagtgctctgggaaaaattttcactgctttacctcttggtaaccccatt

SEQ ID NO: 1599 - DNA, 522 bp, Homo sapiens
agggaaggtggggctatggcagctgctagggaccctccggaagtatcgctgcgagaagccacccagcgaaaattgcggaggttttccgagctaagaggcaaacttgtagcacgtggagaattctgggacatagttgcaataacagcggctgatgaaaaacaggaacttgcttacaaccaacagctgtcagaaaagctgaaaagaaaggagttaccccttggagttcaatatcacgtttttgtggatcctgctggagccaaaattggaaatggaggatcaacactttgtgcccttcaatgtttggaaaagctatatggagataaatggaattcttttaccatcttattaattcactctggtggctacagtcaacgacttccaaatgcaagtgctctgggaaaaattttcactgctttacctcttggtaaccccatttatcagatgctagaattaaaactagccatgtacattgatttccccttaaatatgaatcctggaattctggttacctgtgcagatgat

SEQ ID NO: 1600 - DNA, 132 bp, Homo sapiens
gagaattctgggacatagttgcaataacagcggctgatgaaaaacaggaacttgcttacaaccaacagctgtcagaaaagctgaaaagaaaggagttaccccttggagttcaatatcacgtttttgtggatc

SEQ ID NO: 1601 - DNA, 36 bp, Homo sapiens
agtgaagatagttttctctccagaagaagcaaaagc

SEQ ID NO: 1602 - DNA, 36 bp, Homo sapiens
ctatcagtgaacggagtgagtgtggaaggagaacac

SEQ ID NO: 1603 - DNA, 41 bp, Homo sapiens
tgtaagagaatttagacatcagtggcagcccagagtctaga

SEQ ID NO: 1604 - DNA, 500 bp, Homo sapiens
gcagctagtgaaggccactcccaccctcgagtagttgaactgccaaagactgatgaaggccttggttttaatgtgatgggaggaaaggagcaaaattcccccatttatatctctcgcataattcctggaggggtggctgaaagacacggaggcctcaaaagaggagaccagctgctatcagtgaacggagtgagtgtggaaggagaacaccatgagaaagctgtggaactactcaaggctgctaaagacagcgtcaagctggtggtgcgatacaccccaaaagttctggaagaaatggaggctcgctttgaaaagctacgaacagccaggcgtcggcagcagcagcaattgctaattcagcagcagcaacagcagcagcagcaacaaacacaacaaaaccacatgtcataggcccttgagggaaagctacttgatcaaacatccgatagtcacaaatttgaaaccgtgcttcagaatcccagcacatagtaaaagacaac

SEQ ID NO: 1605 - DNA, 36 bp, Homo sapiens
tttttttttcctgtgcagatctgaaaaccatgagtg

SEQ ID NO: 1606 - DNA, 500 bp, Homo sapiens
aacgcctcaagaataggtactacgtgtctaagaaattattcatggcagacttacagcgagtctttaccaattgcaaagagtacaacccccctgagagtgaatactacaaatgtgccaatatcctggagaaattcttcttcagtaaaattaaggaagctggattaattgacaagtgattttttttcccctctgcttcttagaaactcaccaagcagtgtgcctaaagcaaggtggtttagttttttacaaagaattggacatgatgtattgaagagacttgtaaatgtaataattagcacttttgaaaaaacaaaaaacctccttttagcttttcagatatgtatttaaattgaagtcataggacatttttattttatggaatagattttaatctatttactactattaaggtaaattttctatggcatgtccattagctatttcatgatagatgattaggggtttcctcaaaacctgtgtgtgaggaaattgcacacagt

SEQ ID NO: 1607 - DNA, 47 bp, Homo sapiens
actgctcctgatcctccaagtcaacatttacgtgggcatgggacagg

SEQ ID NO: 1608 - DNA, 500 bp, Homo sapiens
cctaaaatgtgcagcttccttgagtggcgagatctgaagattgtttacaaaagatatgctagtctgtatttttgctgtgctattgaggatcaggacaatgaactaattaccctggaaataattcatcgttatgtggaattacttgacaagtatttcggcagtgtctgtgaactagatatcatctttaattttgagaaggcttattttattttggatgagtttcttttgggaggggaagttcaggaaacatccaagaaaaatgtccttaaagcaattgagcaggctgatctactgcaggaggaagctgaaaccccacgtagtgttcttgaagaaattggactgacataactctcctcccttgttgatgacttcttgtggcatttcacacactgtagatggtcactcccttcatgtccatgttagctcatggtgtaagatgatgtcttgtcagtattactgttttgctaagccgcttcattcatgcctacacaatttttttt

SEQ ID NO: 1609 - DNA, 144 bp, Homo sapiens
agtgttcttgaagaaattggactgacataactctcctcccttgttgatgacttcttgtggcatttcacacactgtagatggtcactcccttcatgtccatgttagctcatggtgtaagatgatgtcttgtcagtattactgttt

SEQ ID NO: 1610 - DNA, 500 bp, Homo sapiens
atctttaattttgagaaggcttattttattttggatgagtttcttttgggaggggaagttcaggaaacatccaagaaaaatgtccttaaagcaattgagcaggctgatctactgcaggaggaagctgaaaccccacgtagtgttcttgaagaaattggactgacataactctcctcccttgttgatgacttcttgtggcatttcacacactgtagatggtcactcccttcatgtccatgttagctcatggtgtaagatgatgtcttgtcagtattactgttttgctaagccgcttcattcatgcctacacaatttttttttaaaagggaactttagttaattaagtgataagggacttaaatatgaattagaatggtgcagaaagagataccttttctggatattttaaagtttaaaggtcagtttctcttaatctgattatgtgcacatatgaaaatggcacatcatatacatgtaaaatcaggcagtatacatttatt

SEQ ID NO: 1611 - DNA, 102 bp, Homo sapiens
atctttaattttgagaaggcttattttattttggatgagtttcttttgggaggggaagttcaggaaacatccaagaaaaatgtccttaaagcaattgagcag

SEQ ID NO: 1612 - DNA, 36 bp, Homo sapiens
gactgaagttcagatccaaaagttcacttgctaatt

SEQ ID NO: 1613 - DNA, 197 bp, Homo sapiens
cagatccaaaagttcacttgctaattatcttcacaaaaatggagagacttctcttaagccagaagattttgattttactgtactttctaaaaggggtatcaagtcaagatataaagactgcagcatggcagccctgacatcccatctacaaaaccaaagtaacaattcaaactggaacctcaggacccgaagcaagt

SEQ ID NO: 1614 - DNA, 36 bp, Homo sapiens
gatatttgagagtcctgggtaagtacattttaatcc

SEQ ID NO: 1615 - DNA, 36 bp, Homo sapiens
cacctttgcacccagttggtaagaactgtttaaaaa

SEQ ID NO: 1616 - DNA, 36 bp, Homo sapiens
cacaccggcagattgcaggtgatgctggctctagcc

SEQ ID NO: 1617 - DNA, 165 bp, Homo sapiens
ctttctaagaagtatggagtacatgtttgtggagaaggtggagagtatgaaactttcactttggattgccctctatttaagaagaaaataattgtggattcatcagaagtagtcatacattcagctgatgcatttgcacctgtggcttatctacgctttttagaa

SEQ ID NO: 1618 - DNA, 36 bp, Homo sapiens
gcattagagatccaagcacagaagtgtgtagagtta

SEQ ID NO: 1619 - DNA, 500 bp, Homo sapiens
ataatggcctcagaatgactgcaagactaagggactttgaagtaaaagatcttcttagtctaactcagttctttggctttgacacagagacattttctctagctgtgaatttactggacagattcctgtctaaaatgaaggtacagcccaagcaccttgggtgtgttggactgagctgcttttatttggctgtaaaatcaatagaagaggaaaggaatgtcccattggcaactgacttgatccgaataagtcaatataggtttacggtttcagacttgatgagaatggaaaagattgtattggagaaggtgtgttggaaagtcaaagctactactgcctttcaatttctgcaactgtattattcactccttcaagagaacttgccacttgaaaggagaaatagcattaattttgaaagactagaagctcaactgaaggcatgtcattgcaggatcatattttctaaagcaaagccttctgtgttggcattgtctatcatt

SEQ ID NO: 1620 - DNA, 36 bp, Homo sapiens
tttcttttgcacattcaggttctctctttaggagca

SEQ ID NO: 1621 - DNA, 500 bp, Homo sapiens
caatccatgaatgattcagaaggagacaactgtaaactaagaagaaggaaattgtcatttgaaagtgaaggagagaaagaaaacagtacaaatgatcctgaagactctgcagataccataagacattatcagagttccaagagacactttgaagagaaaaaaagcagatcctcatctttcatctcctccattgatgatgaacaaaagccgctcttctcaggaatagtagactcttctccaggaatagggaaagcatctgggctcgattttgaagaaacagtgcccacctcaggaagaatgcacatagataaaagaagtcactcttgcaaagatatcactgacatgcgaagctgggaacgagaaaatgcacatccccagcctgaagactccagtccatctgcacttcagcgagctgcctggggtatctctgaaaccgaaagcgacctcacctacggggaagtggaacaaagattagatctgctccaggagcaacttaacag

SEQ ID NO: 1622 - DNA, 500 bp, Homo sapiens
ctgaagactctgcagataccataagacattatcagagttccaagagacactttgaagagaaaaaaagcagatcctcatctttcatctcctccattgatgatgaacaaaagccgctcttctcaggaatagtagactcttctccaggaatagggaaagcatctgggctcgattttgaagaaacagtgcccacctcaggaagaatgcacatagataaaagaagtcactcttgcaaagatatcactgacatgcgaagctgggaacgagaaaatgcacatccccagcctgaagactccagtccatctgcacttcagcgagctgcctggggtatctctgaaaccgaaagcgacctcacctacggggaagtggaacaaagattagatctgctccaggagcaacttaacaggcttgaatcccaaatgaccactgacatccagaccatcttacagttgctgcagaaacaaaccactgtggtccccccagcctacagtatggtaacagca

SEQ ID NO: 1623 - DNA, 180 bp, Homo sapiens
cagagcaaggtccacacttatcactgaaaattttcccacccagccccattaaaaacgttaaagtgtgagagattttatttcaacactgacaagctagttactagagggcctacaaaggtaagtaacaagtttccatttcaacttgagagacaaatgatgttaaaatataagaagcagggt

SEQ ID NO: 1624 - DNA, 36 bp, Homo sapiens
ttcgaaccgagcactgaatctctccagttcttgtta

SEQ ID NO: 1625 - DNA, 374 bp, Homo sapiens
gaaggttttaaaggaaatgcccgggtgattctgcctggaatgactgcttgtatcgaatgcacgctggaactttatccaccacaggttaattttcccatgtgcaccattgcatctatgcccaggctaccagaacactgtattgagtatgtaaggatgttgcagtggcctaaggagcagccttttggagaaggggttccattagatggagatgatcctgaacatatacaatggattttccaaaaatccctagagagagcatcacaatataatattaggggtgttacgtataggctcactcaaggggtagtaaaaagaatcattcctgcagtagcttccacaaatgcagtcattgcagctgtgtgtgccactgaggt

SEQ ID NO: 1626 - DNA, 63 bp, Homo sapiens
tctctccagttcttgttagatacatgtaaagttctagtcattggagctggcggcttaggatgt

SEQ ID NO: 1627 - DNA, 36 bp, Homo sapiens
cattgcatctatgcccaggctaccagaacactgtat

SEQ ID NO: 1628 - DNA, 55 bp, Homo sapiens
ttcctgcagtagcttccacaaatgcagtcattgcagctgtgtgtgccactgaggt

SEQ ID NO: 1629 - DNA, 420 bp, Homo sapiens
aatttcatattattgtatgtggactggactctatcatcgccagaagatggataaatggcatgctgatatctcttctaaattatgaagatggtgtcttagatccaagctccattgtccctttgatagatggggggacagaaggttttaaaggaaatgcccgggtgattctgcctggaatgactgcttgtatcgaatgcacgctggaactttatccaccacaggttaattttcccatgtgcaccattgcatctatgcccaggctaccagaacactgtattgagtatgtaaggatgttgcagtggcctaaggagcagccttttggagaaggggttccattagatggagatgatcctgaacatatacaatggattttccaaaaatccctagagagagcatcacaatataatattaggggtgtta

SEQ ID NO: 1630 - DNA, 26 bp, Homo sapiens
atcattcctgcagtagcttccacaaa

SEQ ID NO: 1631 - DNA, 25 bp, Homo sapiens
gtgccactgaggtttttaaaatagc

SEQ ID NO: 1632 - DNA, 500 bp, Homo sapiens
tcttagatccaagctccattgtccctttgatagatggggggacagaaggttttaaaggaaatgcccgggtgattctgcctggaatgactgcttgtatcgaatgcacgctggaactttatccaccacaggttaattttcccatgtgcaccattgcatctatgcccaggctaccagaacactgtattgagtatgtaaggatgttgcagtggcctaaggagcagccttttggagaaggggttccattagatggagatgatcctgaacatatacaatggattttccaaaaatccctagagagagcatcacaatataatattaggggtgttacgtataggctcactcaaggggtagtaaaaagaatcattcctgcagtagcttccacaaatgcagtcattgcagctgtgtgtgccactgaggtttttaaaatagccacaagtgcatacattcccttgaataattacttggtgtttaatgatgtagatgggctgtatacatacaca

SEQ ID NO: 1633 - DNA, 36 bp, Homo sapiens
gcccatcgcattgggcagaaacgtgtggttaacgta

SEQ ID NO: 1634 - DNA, 500 bp, Homo sapiens
attcagcagtcactgacagttttagttccacgtgtctggccttttttgcatcacactatatcatcagttcgaagagcagcattggaaactctgtttacgttattatcaacacaggaccagaactcttcatcttggcttatacctatactgcctgatatgctccgacacatttttcagttctgtgttttggaaagcagccaggaaattctggaccttattcacaaggtttggatggaactgttgagtaaggcttcagttcagtatgtggtagcagctgcttgcccatggatgggtgcttggctttgcttgatgatgcagccttctcatttacctatcgatttaaatatgttgctagaagtaaaagctagagccaaggaaaaaacaggtggtaaggtgcgccaaggccaaagccagaataaagaagtacttcaggagtatattgcaggtgccgacaccatcatggaagacccagccaccagggattttgtagttatgcgggc

SEQ ID NO: 1635 - DNA, 36 bp, Homo sapiens
tttcatggctaccaacagtctgcatcttacaacctt

SEQ ID NO: 1636 - DNA, 160 bp, Homo sapiens
cttttagctgactagatgcttaacttagtaacaagtttagcccttgtaactggctagctaaaagcaaatcggcttgtttctcagatctttgggggatagcaagaaacatttgagtgaatgttgttgaagattttcagtagtatagaaaatgatggcgctc

SEQ ID NO: 1637 - DNA, 46 bp, Homo sapiens
atttctactcctcccagaagaatgcagtcccagcaggaaaggctac

SEQ ID NO: 1638 - DNA, 500 bp, Homo sapiens
gatttcaagagaagttttttatttttgctttgacacctcaacaagttagagagatatgcatatccagggattttttgccaggtggtaggagagattatacagtccaagttcagttgagactttgcctggcagagacaagttgccctcaagaagataactatccaaatagtctatgtataaaagtaaatgggaagctatttcctttgcctggctatgcaccaccgcctaaaaatgggattgaacagaagcgccctggacgccccttgaatattacatctttagttaggttatcttcagctgtgccaaaccaaatttccatttcttgggcatcagaaattgggaagaattactctatgtctgtatatcttgtacggcagcttacatcagccatgttattacagagattaaaaatgaaaggtattagaaaccctgatcattccagagcactaattaaagaaaaacttactgcagatcctgatagtgaaattgctacaactagc

SEQ ID NO: 1639 - DNA, 482 bp, Homo sapiens
ggcttccgtcctggtagccaacgctaattctccctcgagttcttgggagatgggcatttggcgagaaggctggcgttagtgaagcgcgtccggcgtcacggaaagaagcacttgtaaggaaatatagcatccattgtgaaagtggaaaagtaaagataattcatcatgcctgctgtggcttcagttcctaaagaactctacctcagttcttcactaaaagaccttaataagaagacagaagttaaaccagagaaaataagcactaagagttatgtgcacagtgccctgaagatctttaagacagcagaagaatgcagattagatcgtgatgaggaaagggcctatgtactatatatgaaatacgtgactgtttataatcttatcaaaaaaagacctgatttcaagcaacagcaggattatttccattcaatacttggacctggaaacatcaaaaaagctgtcgaagaagctgaaagactctc

SEQ ID NO: 1640 - DNA, 27 bp, Homo sapiens
tcctttgctccttccccagaccaagaa

SEQ ID NO: 1641 - DNA, 36 bp, Homo sapiens
ctgacaaccgagaaatgggtaggcatgatgacagac

SEQ ID NO: 1642 - DNA, 318 bp, Homo sapiens
gccatcacccagtttcggttatttaaattttgtacctgcctagcaacagtattctcattcctaaagagattaatatgcagatctggcagaggacggaaattaagtggagaccaaataactttgccaactacagttgattattcatcagttcctaagcagacagatgttgaagagtggacttcctgggatgaagatgcacccaccagtgtaaagatcgaaggagggaatgggaatgtggcaacacaacaaaattctttggaacaactggaacctgactattttaaggacatgacaccaactattaggaaaactcagaaa

SEQ ID NO: 1643 - DNA, 500 bp, Homo sapiens
cttcatactggagagataccttaaaagtgtagtgagtgtggcaagacctttagtctgaagtcataccttacgaaccatcgtagacttcatactggagaggtaccttacaaggataatgagtgtagaaaaacctttcatgggcagtcagcattttacaaatgtaatgattgtcaccaagtcttgagtaatgctacaactattgcaaatcattggagaatccataatgaagagagatcctacaagtgtgataaatgcagaataaatgcagaaaatttttcagacatccttcatacctttgcagttcatgggtgaagtcgtattagaaaccttacaaatgtgaagaatgtgatgaagctttcagattcaaatcaaaccttgatagtcatagaattcatactagagagaaaccttagcagtgtaatgaacgtggcaaggttttaaatcaaaaagcaaagcttgcacatcatcatagaattcatactggagataaacgttacaaa

SEQ ID NO: 1644 - DNA, 500 bp, Homo sapiens
cttcatactggagagataccttaaaagtgtagtgagtgtggcaagacctttagtctgaagtcataccttacgcaccatcgtagacttcatactggagaggtaccttacaaggataatgagtgtagaaaaacctttcatgggcagtcagcattttacaaatgtaatgattgtcaccaagtcttgagtaatgctacaactattgcaaatcattggagaatccataatgaagagagatcctacaagtgtgataaatgcagaataaatgcagaaaatttttcagacatccttcatacctttgcagttcatgggtgaagtcgtattagaaaccttacaaatgtgaagaatgtgatgaagctttcagattcaaatcaaaccttgatagtcatagaattcatactagagagaaaccttagcagtgtaatgaacgtggcaaggttttaaatcaaaaagcaaagcttgcacatcatcatagaattcatactggagataaacgttacaaa

SEQ ID NO: 1645 - DNA, 475 bp, Homo sapiens
ttagcagtgtaatgaacgtggcaaggttttaaatcaaaaagcaaagcttgcacatcatcatagaattcatactggagataaacgttacaaatgtgaagcatgtgacaaagtttacagtcgcaaatcaagcctccaaagacaggagaattcatactggagagaaagcttacatatgtgaagaatgtcaccaagttttcagtcacactcaaaccttgaaagacacaggagaattcctactggagagatagcataaaaatgtaagagtttgtgacaaggctttcaggcataattcgcacctggcacaacatcctagaattcacattggagagaaagcttacaagtataatgaatgtgacaggtctttagtgggcagtcaacacttgtttaccatcaggcaatccatggtgtagggaaactttacttatgtaatgattgtcacaaagtcttcagttacactacaaccattgcgaatcat

SEQ ID NO: 1646 - DNA, 500 bp, Homo sapiens
atggctccagaggtattagagggtgctataaacttccaaagggatgcatttttgaggatagatatgtatgccatgggattagtcctatgggaactggcttctcgctgtactgctgcagatggacctgtagatgaatacatgttgccatttgaggaggaaattggccagcatccatctcttgaagacatgcaggaagttgttgtgcataaaaaaaagaggcctgttttaagagattattggcagaaacatgctggaatggcaatgctctgtgaaaccattgaagaatgttgggatcacgacgcagaagccaggttatcagctggatgtgtaggtgaaagaattacccagatgcagagactaacaaatattattaccacagaggacattgtaacagtggtcacaatggtgacaaatgttgactttcctcccaaagaatctagtctatgatggttgcgccatctgtgcacactaagaaatgggactctgaactggagctgcta

SEQ ID NO: 1647 - DNA, 36 bp, Homo sapiens
cactttacttcctgccagaatacgagccatcatggg

SEQ ID NO: 1648 - DNA, 57 bp, Homo sapiens
aacaaaaatgagcatctcccttgccccagaaggctgccaaaagaatggaaagaagtg

SEQ ID NO: 1649 - DNA, 25 bp, Homo sapiens
agcgcgatcccaggacacgtcggga

SEQ ID NO: 1650 - DNA, 500 bp, Homo sapiens
gggaagagaagaaacttcgagttgaaaatgctaaactgaagaaagaaattgaagaactgaaacaagagctaattcaggcagaaattcaaaatggagtgaagcaaataccatttccatctggtactccactgcacgctaattctatggtttctgaaaatgtgatacagtctacagcagtaacaaccgtatcttctggtaccaaagaacagataaaaggaggaacaggagacgaaaagaaagcgaaagagaaaattgaaaagaaaggagagaagaaggagaaaaaacagcaatcaatagctggaagtgccgactctaagccaatagatgtttcccgtctggatcttcgaattggttgcatcataactgctagaaaacaccctgatgcagattctttgtatgtggaagaagtagatgtcggagaaatagccccaaggacagttgtcagtggcctggtgaatcatgttcctcttgaacagatgcaaaatcggatggtgatttta

SEQ ID NO: 1651 - DNA, 500 bp, Homo sapiens
catctggtactccactgcacgctaattctatggtttctgaaaatgtgatacagtctacagcagtaacaaccgtatcttctggtaccaaagaacagataaaaggaggaacaggagacgaaaagaaagcgaaagagaaaattgaaaagaaaggagagaagaaggagaaaaaacagcaatcaatagctggaagtgccgactctaagccaatagatgtttcccgtctggatcttcgaattggttgcatcataactgctagaaaacaccctgatgcagattctttgtatgtggaagaagtagatgtcggagaaatagccccaaggacagttgtcagtggcctggtgaatcatgttcctcttgaacagatgcaaaatcggatggtgattttactttgtaacctgaaacctgcaaagatgaggggagtattatctcaagcaatggtcatgtgtgctagttcaccagagaaaattgaaatcttggctcctccaaatgggtctgttcct

SEQ ID NO: 1652 - DNA, 500 bp, Homo sapiens
aacagcaatcaatagctggaagtgccgactctaagccaatagatgtttcccgtctggatcttcgaattggttgcatcataactgctagaaaacaccctgatgcagattctttgtatgtggaagaagtagatgtcggagaaatagccccaaggacagttgtcagtggcctggtgaatcatgttcctcttgaacagatgcaaaatcggatggtgattttactttgtaacctgaaacctgcaaagatgaggggagtattatctcaagcaatggtcatgtgtgctagttcaccagagaaaattgaaatcttggctcctccaaatgggtctgttcctggagacagaattacttttgatgctttcccaggagagcctgacaaggagctgaatcctaagaagaagatttgggagcagatccagcctgatcttcacactaatgatgagtgtgtggctacatacaaaggagttccctttgaggtgaaagggaagggagtatgtagggct

SEQ ID NO: 1653 - DNA, 500 bp, Homo sapiens
tgctagccggacacgccaactcttcgttcgattattagctttagtgaaatgggctaataatgctggcaaagtggaaaaatgtgcgatgatttcaagctttttagatcagcaagccatcctgtttgtggacactgctgatcgcctggcctcgttagctagagatgctctggtccatgcacgcctgcctagttttgccatcccatatgccattgatgtactaactactggatcttacccacggctgccaacctgcattagggaaaattattcctccagacccaattaccaaaattgaaaaacaagccacactccatcagctgaatcagattcttagacatcggcttgtaaccacagatcttcctcctcagttagcaaatcttacagttgcaaatggccgggtgaagtttcgtgttgaaggagaatttgaagccaccttgactgtgatgggagatgaccctgatgttccatggcgtcttctcaagctagaaattctagttgag

SEQ ID NO: 1654 - DNA, 166 bp, Homo sapiens
agttgttccaagtcaaatatttgagctggaggatggtaccagcagctacaaagattttgcaatgagcaaaaataatcgctttacaagtgctggccaagcatctaagaatataatccagccaccctcctgtgttttgcattattataatgttccattgtgtgtcaca

SEQ ID NO: 1655 - DNA, 36 bp, Homo sapiens
gaggaggactacgacctggaatactctgaagatagt

SEQ ID NO: 1656 - DNA, 36 bp, Homo sapiens
ccatttgactcacaggaggccaagccgtacaaaaat

SEQ ID NO: 1657 - DNA, 297 bp, Homo sapiens
tactctgaagatagtaactccgagccaaatgtggatttggaaaatcagtactataattccaaagcattaaaagaagatgacccaaaagcggcattaagcagtttccaaaaggttttggaacttgaaggtgaaaaaggagaatggggatttaaagcactgaaacaaatgattaagattaacttcaagttgacaaactttccagaaatgatgaatagatataagcagctattgacctatattcggagtgcagtcacaagaaattattctgaaaaatccattaattctattcttgattat

SEQ ID NO: 1658 - DNA, 78 bp, Homo sapiens
aactccgagccaaatgtggatttggaaaatcagtactataattccaaagcattaaaagaagatgacccaaaagcggca

SEQ ID NO: 1659 - DNA, 156 bp, Homo sapiens
gccaagatgtctgacatggaggatgatttcatgtgcgatgatgaggaggactacgacctggaatactctgaagatagtaactccgagccaaatgtggatttggaaaatcagtactataattccaaagcattaaaagaagatgacccaaaagcggca

SEQ ID NO: 1660 - DNA, 234 bp, Homo sapiens
gccaagatgtctgacatggaggatgatttcatgtgcgatgatgaggaggactacgacctggaatactctgaagatagtaactccgagccaaatgtggatttggaaaatcagtactataattccaaagcattaaaagaagatgacccaaaagcggcattaagcagtttccaaaaggttttggaacttgaaggtgaaaaaggagaatggggatttaaagcactgaaacaaatgatt

SEQ ID NO: 1661 - DNA, 42 bp, Homo sapiens
gaacgagaggaatatggaaagcttcaaaaaattttacgccag

SEQ ID NO: 1662 - DNA, 500 bp, Homo sapiens
gaacacaagtgcttataaaattaattaagccttacacaagaatacatattccttttatttctaaggagttaaacatagatgtagctgatgtggagagcttgctggtgcagtgcatattggataacactattcatggccgaattgatcaagtcaaccaactccttgaactggatcatcagaagaggggtggtgcacgatatactgcactagataaatggaccaaccaactaaattctctcaaccaggctgtagtcagtaaactggcttaacagagaacaagcttttacagacgtccttaaggcaacagtgcagagatgtaatccttaaaagaactgggaatggcaaaactactgtcggttgatgtgtcctgaaaattattggagttatggcagaagtgcttttttgatcaactggtttgtgttttgctgctgcatttatcccaagaaaaacagctttaatctccagaagaaaaccaaaataccatgggatttatgctgtat

SEQ ID NO: 1663 - DNA, 500 bp, Homo sapiens
tgatcaagtcaaccaactccttgaactggatcatcagaagaggggtggtgcacgatatactgcactagataaatggaccaaccaactaaattctctcaaccaggctgtagtcagtaaactggcttaacagagaacaagcttttacagacgtccttaaggcaacagtgcagagatgtaatccttaaaagaactgggaatggcaaaactactgtcggttgatgtgtcctgaaaattattggagttatggcagaagtgcttttttgatcaactggtttgtgttttgctgctgcatttatcccaagaaaaacagctttaatctccagaagaaaaccaaaataccatgggatttatgctgtattgacatcttgccctaaacgtacaacatcatagtaatttgtcatgggcaacatgaccagagagaagatttttgtcatgattttaaatacactgacacgctactgttggttaaatttaaacatgttttacctgcagaaattctc

SEQ ID NO: 1664 - DNA, 500 bp, Homo sapiens
tgaaggagaaacatcagatggagtgaggaagtcagttcacaaggtctttgcttccatgcttggagagaatgaagatgatgaggaggaagaggaagaagaggaggaggaggaggaggaggaagaaacacctgagcaacccactgcgggcgatgtatttgtattggagatggttctcaatcgtgaaaccaagaaaatgatgaaagagaaaaggcctcggagtaaacttcccagagctctgagaggtctcatgggtgaagccaacattcgttttgctcgaggagaacgtgaagaggcgatattgatgtgcatggaaatcataagacaagctcctctggcttatgagccattctctactctagccatgatatatgaggaccaaggtgacatggaaaaatcattgcagtttgagttgattgctgcgcatttaaatcccagtgacacagaagaatgggttagactggcagaaatgtctctggaacaagacaatattaagcaggcta

SEQ ID NO: 1665 - DNA, 94 bp, Homo sapiens
gatattacaaattatcaaagctttgagaatttagaagattggtatactgtggtgaagaaagtgagcgaggagtcagaaactcagccactggttg

SEQ ID NO: 1666 - DNA, 424 bp, Homo sapiens
ggggaggtgggcaagatggcgcttgccgagtgattctcctcgaatacctcctgccggcgcggagacaccggggcgggggtcctgccgcaactacctcccttcctcctctcccccgcccccggagccttcatccttcccttccccccccacctcgaggggcgggcctggttcccgggacaccatgtcggactctgaggaggagagccaggaccggcaactgaaaatcgtcgtgctgggggacggcgcctccgggaagacctccttaactacgtgttttgctcaagaaacttttgggaaacagtacaaacaaactataggactggatttctttttgagaaggataacattgccaggaaacttgaatgttacccttcaaatttgggatataggagggcagacaataggaggcaaaatgttggataaa

SEQ ID NO: 1667 - DNA, 36 bp, Homo sapiens
aatcagatggactctacggaagatgcccaggaagaa

SEQ ID NO: 1668 - DNA, 105 bp, Homo sapiens
cttgaatcagcaatacatcagctgtacaaacagcgagcttcccgccttgtccaaagacgacaagatgatattaaagatgaatcttcggagttttcaagccattca

SEQ ID NO: 1669 - DNA, 500 bp, Homo sapiens
caaatcgacagcagcatgagaaacatctgcaaagccgagtggactctaccagggctattgaaagattagaagggtcttctgggggtattggtgaacggtataaatttttgcaagaaatgcgagggtatgtccaagacttgcttgagtgtttcagtgaaaaggtgccactgattaatgaacttgaatcagcaatacatcagctgtacaaacagcgagcttcccgccttgtccaaagacgacaagatgatattaaagatgaatcttcggagttttcaagccattcaagtcagtccatcttgaagacaaagctctgatggcaccaaatcttgactcctttggacgcgatcgggcactgtatcaagagcatgcaaaacgtcgcattgcagagcgggaggccaggaggactcgtcgtagacaagccagagaacaaaccggtaagatggcagatcaccttgaaggcctttccagtgatgatgaagaaacttctacagatattacta

SEQ ID NO: 1670 - DNA, 500 bp, Homo sapiens
caaggaaggccagattctcctgtctatgctaaccttcaagaactgaaaatatcccagtctgctcttcccccacttcctgggagcccggcaattcagattaatggagaatgggaaactcataaagacagctcagggcgttgctattactataacagagggacacaggaaagaacttggaaacctcctcgttggactcgggatgcaagcatcagcaaaggagatttccaaaatccaggggatcaagagcttctttcatcggaagaaaactactacagcacttcttacagccagtcagatagtcagtgtggttctcctccaaggggttggtcagaagagttggatgaacgtgggcataccttatataccagtgactatactaatgaaaagtggctcaagcatgttgatgatcaaggtagacaatattactacagtgcagacggatctcggtcagaatgggaattgccaaagtataatgcttcatcccagcagcaaagagaaat

SEQ ID NO: 1671 - DNA, 489 bp, Homo sapiens
cattctctttgtgatggccttcctgctctctggtgctgctcctctgaagattcaagcttatttcaatgagactgcagacctgccatgccaatttgcaaactctcaaaaccaaagcctgagtgagctagtagtattttggcaggaccaggaaaacttggttctgaatgaggtatacttaggcaaagagaaatttgacagtgttcattccaagtatatgggccgcacaagttttgattcggacagttggaccctgagacttcacaatcttcagatcaaggacaagggcttgtatcaatgtatcatccatcacaaaaagcccacaggaatgattcgcatccaccagatgaattctgaactgtcagtgcttgctaacttcagtcaacctgaaatagtaccaatttctaatataacagaaaatgtgtacataaatttgacctgctcatctatacacggttacccagaacctaagaagatgagtgttttgctaag

SEQ ID NO: 1672 - DNA, 57 bp, Homo sapiens
ttcgaaggcacgatatgcgtgtccatccttaccaaaggattgtgaccgcagaccgag

SEQ ID NO: 1673 - DNA, 500 bp, Homo sapiens
aaatgaataagaggtgatggaccagtttactgcttagaaatagcaagaggcactgcagtaaaacttgtttctcattgtaaagcttcatgtcttttgtttgttggaaaatttttacttatagaaacttaattattagactggtaaaataaagaccaaaatatgcagatttctaattggcattcataaggtgaataataataagtgcccaatgaaaaaatctattatggttaatttcatttcttgctttgccacctaagcagtaaaacatgatattgaccacttggagaactcagaaaattattttaaatttctaagttataataaatttgcacacagataacatgcatgctatttatgtcacatctcacattaaattattttaaaataagcagtgcccttcaaaacagatgcagacatgtgtgttggtagtagtgaggagattggtattagcatcaagtcttcattgatgactaatttttaattcccttccttttatcttt

SEQ ID NO: 1674 - DNA, 500 bp, Homo sapiens
gaaatgttgcataatgccagtttactcatcgatgatattgaagacaactcaaaactccgacgtggctttccagtggcccacagcatctatggaatcccatctgtcatcaattctgccaattacgtgtatttccttggcttggagaaagtcttaacccttgatcacccagatgcagtgaagctttttacccgccagcttttggaactccatcagggacaaggcctagatatttactggagggataattacacttgtcccactgaagaagaatataaagctatggtgctgcagaaaacaggtggactgtttggattagcagtaggtctcatgcagttgttctctgattacaaagaagatttaaaaccgctacttaatacacttgggctctttttccaaattagggatgattatgctaatctacactccaaagaatatagtgaaaacaaaagtttttgtgaagatctgacagagggaaagttctcatttcctactattcatgc

SEQ ID NO: 1675 - DNA, 500 bp, Homo sapiens
ccaatttgtgttgttctgattcaataattggtttctgggtggccaattcagaagaagagtgtacatgctcaacaaatcctaggccctgcattcctgtcatcctcatccgggggaaacaccatcatcccagtagctgccctattcaactgcaacagtctccaggaccatcagtatactgcatttcatgtgcaccaaatattttgaaagacatttataaataattggcttatgactcatatttctctatgaataccttcatacagcaggtataactcttttctttatgggcttaaatattttgtcactgatcctgcaaatggacatcattttagcacactagcggtttatattttaaggaccttcattctctgttctgcacctcttctggaaattgagtaaattttgcttttttttttttactcagttgcaacttacgcttggcatcttcagaatgcttttctagcattaagagatgtaaatgataaaggaattattgtatg

SEQ ID NO: 1676 - DNA, 228 bp, Homo sapiens
tagcagaaatggcggctgcggcggctcgagtggtgttgtcatccgcggcgcgggcggctctggggtttcagcgagagtcttctaatccgaggcgctgcgggacggtcattatattttggagagaacagattaagaagtacacaggctgctacccaagttgttctgaatgttcctgaaacaagagtaacatgtttagaaagtggactcagagtagcttcggaagactct

SEQ ID NO: 1677 - DNA, 391 bp, Homo sapiens
gtctgccaggagctacggccggaagatggcggcggccgcagagttgtcgctactggagaagtccctgggactgagtaaggggaataaatacagtgctcagggcgagcgacagattccagttcttcagacaaacaatggtccaagtctaacaggattgactactatagcagctcatctagtcaagcaagccaacaaagaatatttgctggggagtactgcagaagaaaaagcaatcgttcagcagtggttagaatacagggtcactcaagtagatgggcactccagtaaaaatgacatccacacactgttgaaggatcttaattcatatcttgaagataaagtctaccttacagggtataactttacattagcagatatactattgtactat

SEQ ID NO: 1678 - DNA, 59 bp, Homo sapiens
cccaatctgatgagcaatatgcttgccatcttggttgccagaatcagctgccattcgct

SEQ ID NO: 1679 - DNA, 500 bp, Homo sapiens
atgaaataggcatttacctgactgattgcatggaaagagctagggaagtgattccaaggtcccagcaccaagagacacccgtttacctgggagccacggcaggcatgcggttgctcaggatggaaagtgaagagttggcagacagggttctggatgtggtggagaggagcctcagcaactacccctttgacttccagggtgccaggatcattactggccaagaggaaggtgcctatggctggattactatcaactatctgctgggcaaattcagtcagaaaacaaggtggttcagcatagtcccatatgaaaccaataatcaggaaacctttggagctttggaccttgggggagcctctacacaagtcacttttgtaccccaaaaccagactatcgagtccccagataatgctctgcaatttcgcctctatggcaaggactacaatgtctacacacatagcttcttgtgctatgggaaggatcaggcactctggcagaaa

SEQ ID NO: 1680 - DNA, 445 bp, Homo sapiens
ctcaagacctttggccagagcagggcatggaagattcttttcaaaaagcaatactgagaagatatggaaaatatggacatgagaatttacagttaagaaaaggctgtaaaagtgtggatgagtataaggtgaacaaagaaggttataatggacttaaccagtgtttcacaactgcccagagcaaagtatttcaatgtgataaatatttgaaagtcttctataaatttttaaattcaaacagacctaagataagacatactgaaaagaaatctttcaaatgtaaaaaacgtgtcaaattattttgcatgctttcacataaaacccaacacaaaagcatttatcatagagagaagtcctacaaatgtaaagaatgtggaaaaacctttaattggtcctcaacccttactaatcataggaaaatttatactgaagagaaaccttacaa

SEQ ID NO: 1681 - DNA, 25 bp, Homo sapiens
aagaaaagaagaggcctgtggacag

SEQ ID NO: 1682 - DNA, 392 bp, Homo sapiens
cttgctgctggaaacgcagttccggttaggcggctgagtttgtttacgttgctaacagatctagcccctgctttccctagttccagttccaagatggggaaatccttcgccaacttcatgtgcaagaaagactttcatcctgcctccaaatccaatatcaaaaaagtatggatggcagaacagaaaatatcatatgataagaagaaacaagaagaattgatgcagcaatatcttaaagaacaagaatcatatgataatagattgcttatgggagatgaacgtgtaaagaatggccttaatttcatgtatgaagccccaccaggagctaaaaaagaaaacaaagagaaagaagaaacagaaggagagaccgaatacaaatttgaatggcagaa

SEQ ID NO: 1683 - DNA, 36 bp, Homo sapiens
aaggccaaggaagctgcggcattgggatcccgtggc

SEQ ID NO: 1684 - DNA, 36 bp, Homo sapiens
cgtctgtcctgcgccaagatgcttcaaagtattatt

SEQ ID NO: 1685 - DNA, 36 bp, Homo sapiens
ataaaatccgggctgctgataaaagaagtaaggctt

SEQ ID NO: 1686 - DNA, 25 bp, Homo sapiens
tgcgttctgagccgtctgtcctgcg

SEQ ID NO: 1687 - DNA, 129 bp, Homo sapiens
aaaaacatatggatccccatgaagccctactacaccaaagtttaccaggagatttggataggaatggggctgatgggcttcatcgtttataaaatccgggctgctgataaaagaagtaaggctttgaaa

SEQ ID NO: 1688 - DNA, 42 bp, Homo sapiens
gacctttccgagttggctgcagatttgtggtgcgttctgagc

SEQ ID NO: 1689 - DNA, 56 bp, Homo sapiens
tttattataatattgatcagttttatgccgcattgttcgtggcagtagaccacatc

SEQ ID NO: 1690 - DNA, 36 bp, Homo sapiens
ttatgcttatgtctgcaggaagaagtagctaaaaac

SEQ ID NO: 1691 - DNA, 36 bp, Homo sapiens
taaccatcatcacagcagatgtagacagaaatggca

SEQ ID NO: 1692 - DNA, 500 bp, Homo sapiens
tgtagaattcacgttttgtaatgacactgtcgtcattccatgctttgttactaatatggaggcacaaaacactactgaagtatacgtaaagtggaaatttaaaggaagagatatttacacctttgatggagctctaaacaagtccactgtccccactgactttagtagtgcaaaaattgaagtctcacaattactaaaaggagatgcctctttgaagatggataagagtgatgctgtctcacacacaggaaactacacttgtgaagtaacagaattaaccagagaaggtgaaacgatcatcgagctaaaatatcgtgttgtttcatggttttctccaaatgaaaatattcttattgttattttcccaatttttgctatactcctgttctggggacagtttggtattaaaacacttaaatatagatccggtggtatggatgagaaaacaattgctttacttgttgctggactagtgatcactgtcattgtcattgttggag

SEQ ID NO: 1693 - DNA, 188 bp, Homo sapiens
ttaataaaacaaaatctgtagaattcacgttttgtaatgacactgtcgtcattccatgctttgttactaatatggaggcacaaaacactactgaagtatacgtaaagtggaaatttaaaggaagagatatttacacctttgatggagctctaaacaagtccactgtccccactgactttagtagtgca

SEQ ID NO: 1694 - DNA, 327 bp, Homo sapiens
gagtgaaaaggctctcagtgtctgagttaaatgaaatcctggaagaaattgagactgccattaaggagtactctgaggagctggtgcagcagttggctttacgagatgaactggagtttgaaaaggaagtgaaaaacagctttatttctgttcttattgaagtgcaaaacaaacagaaagagcacaaagaaacagcaaaaaagaaaaagaaactaaaaaatggcagctctcagaatgggaagaatgagagaagtcatatgcccggcacatatttgactacagtcattccttatgagaaaaaaaacggaccaccgtctgttgaagatc

SEQ ID NO: 1695 - DNA, 208 bp, Homo sapiens
gatttggaatgccctgacagataattatgggaatgtgatgcctgtagactggaagtcatcgcatactaggaccttgcacttgcttactctgaacctctcagaaaaaggggtaagtgacagtttgctctttgatacatcagatgatgaagagctgagagaacagctggatatgcactcaatcatcgtctcctgtgttaatgatgaaccc

SEQ ID NO: 1696 - DNA, 180 bp, Homo sapiens
ggacagcaatctgcagaagaagagaacttcaaaaaaccaactagaagcaacatgcagagaagtaaaatgagaggggcctcctcaggaaagaagacagctggtccacagcagaaaaatcttgaaccagctctcccaggaagatggggtggtcgctctgcagagaaccccccttcaggatcc

SEQ ID NO: 1697 - DNA, 216 bp, Homo sapiens
ggttgaatgagttccagaaagcagggttctcaacctcgtggacagcaatctgcagaagaagagaacttcaaaaaaccaactagaagcaacatgcagagaagtaaaatgagaggggcctcctcaggaaagaagacagctggtccacagcagaaaaatcttgaaccagctctcccaggaagatggggtggtcgctctgcagagaaccccccttcagga

SEQ ID NO: 1698 - DNA, 25 bp, Homo sapiens
ccacatgaacaaattaaagagtgca

SEQ ID NO: 1699 - DNA, 36 bp, Homo sapiens
ttaaagatttacccccagatacagctggctgaaata

SEQ ID NO: 1700 - DNA, 40 bp, Homo sapiens
gtgtgatgtctgcaagaaacttgtggatctatattaccaa

SEQ ID NO: 1701 - DNA, 69 bp, Homo sapiens
aaacaccatgcttcgagctaaagtggcacagttacaaacagattatgatgctctgaaaaggcagatctc

SEQ ID NO: 1702 - DNA, 25 bp, Homo sapiens
aaaacgatacgcaggtagagaggaa

SEQ ID NO: 1703 - DNA, 36 bp, Homo sapiens
atttgggcaaatgagctttgatcaccagcagcttgc

SEQ ID NO: 1704 - DNA, 500 bp, Homo sapiens
tcatttagaaaataaagttactcatggacttgttactgtggaaggtcagttaacatccgatgagagaggcgcacacataatgaacagtacctgtgctgcgatgccaaagctgcatgaaccatatgccagcagtcagtgtatagcaagtccaaactttggaactgtgagtggactcaagccagccagtatgttagagaaaaactgcagtttgcaaacagaactgaataagtcttatgatgtaaaaaacccttctcctttattgatgcaaaaccagaatacgagacagcagatggacacacctatggtgtcctgtggaaatgaacaatttttggataacagttttgagaaagttaaacggagacttgatttagatattgatggtttgcaaaaagaaaactgcccttatgtcataacaagtggaataactgaacaagaaaggcaacatttgccagaaaaaagataccctaagggatctggcttctttaacaagaataaaatgt

SEQ ID NO: 1705 - DNA, 36 bp, Homo sapiens
gaaacagaaaattctctgccaatacctgcaagtaag

SEQ ID NO: 1706 - DNA, 500 bp, Homo sapiens
aaaatacaatagaaaatggcctttctttaggagaaaaaagcactattccagttcaacaagggttacctaccagtaagtctgagattacaaatcaattatcagtctctgatattaacagtcaatctgttggaggggccagacctaagcaattgtttagccttccatcaagaacaaggagttcaaaggacctgaataagccagatgttccagatacaatagaaagtgaacccagcacagcagataccgttgttccaatcacttgtgctatagattctacagctgatccacaggttagcttcaactctaattacattgatatagaaagtaattctgaaggtggatctagtttcgtaactgcaaatgaagattctgtacctgaaaacacttgcaaagaaggcttggttttgggccagaaacagcctacttgggttcctgattcagaagctccaaactgtatgaactgccaagtcaaatttacttttaccaaacggcgacaccat

SEQ ID NO: 1707 - DNA, 36 bp, Homo sapiens
tcacctgatgtgcctatgtgcctgtagtagaagaac

SEQ ID NO: 1708 - DNA, 500 bp, Homo sapiens
atgcaatggcaatggttgaccattgtttgaaaaaagccctttggtttcaggggagatgtgtgaaggttgacctgtctgagaaatataaaaaactggttctgaggattccaaacagaggcattgatttactgaaaaaagataaatcccgaaaaagatcttactctccagatggcaaagaatctccaagtgataagaaatccaaaactgatggttcccagaagactgagagttcaaccgaaggtaaagaacaagaagagaagtccggtgaagatggtgagaaagacacaaaggatgaccagacagagcaggaacctaatatgcttcttgaatctgaagatgagctacttgtagatgaagaagaagcagcagcactgctagaaagtggcagttcagtgggagacgagaccgatcttgctaatttaggtgatgtggcttctgatgggaaaaaggaaccatcagataaagctgtgaaaaaagatggaagtgcttcagcagcagca

SEQ ID NO: 1709 - DNA, 500 bp, Homo sapiens
cttgatcaagaaaacgaagcagcgttggaaaatggaattaaaaatgaggaaaacacagaaccaggtgctgaatcttctgagaacgctgatgatcccaacaaagatacaagtgaaaacgcagatggtcaaagtgatgagaacaaggacgactatacaatcccagatgagtatagaattggaccatatcagcccaatgttcctgttggtatagactatgtgatacctaaaacagggttttactgtaagctgtgttcactcttttatacaaatgaagaagttgcaaagaatactcattgcagcagccttcctcattatcagaaattaaagaaatttctgaataaattggcagaagaacgcagacagaagaaggaaacttaagatgtgcaaggagatttaatgatttcaaagaaaataatggttctttgtttttaatgttaaccttttttaaatacaatactgatagttagaagaaaactattgtactcttttgttttagtgga

SEQ ID NO: 1710 - DNA, 298 bp, Homo sapiens
cttgatcaagaaaacgaagcagcgttggaaaatggaattaaaaatgaggaaaacacagaaccaggtgctgaatcttctgagaacgctgatgatcccaacaaagatacaagtgaaaacgcagatggtcaaagtgatgagaacaaggacgactatacaatcccagatgagtatagaattggaccatatcagcccaatgttcctgttggtatagactatgtgatacctaaaacagggttttactgtaagctgtgttcactcttttatacaaatgaagaagttgcaaagaatactcattgca

SEQ ID NO: 1711 - DNA, 77 bp, Homo sapiens
gcagcagtctacaaatccagcaccaggaattctgggacctccacctccctcatttcatcttgggggaccagcagttg

SEQ ID NO: 1712 - DNA, 96 bp, Homo sapiens
acaagagaagatgcaatggcaatggttgaccattgtttgaaaaaagccctttggtttcaggggagatgtgtgaaggttgacctgtctgagaaatat

SEQ ID NO: 1713 - DNA, 187 bp, Homo sapiens
cttgatcaagaaaacgaagcagcgttggaaaatggaattaaaaatgaggaaaacacagaaccaggtgctgaatcttctgagaacgctgatgatcccaacaaagatacaagtgaaaacgcagatggtcaaagtgatgagaacaaggacgactatacaatcccagatgagtatagaattggaccatatc

SEQ ID NO: 1714 - DNA, 500 bp, Homo sapiens
tgagagttcaaccgaaggtaaagaacaagaagagaagtccggtgaagatggtgagaaagacacaaaggatgaccagacagagcaggaacctaatatgcttcttgaatctgaagatgagctacttgtagatgaagaagaagcagcagcactgctagaaagtggcagttcagtgggagacgagaccgatcttgctaatttaggtgatgtggcttctgatgggaaaaaggaaccatcagataaagctgtgaaaaaagatggaagtgcttcagcagcagcaaagaaaaagcttaaaaaggtggacaagatcgaggaacttgatcaagaaaacgaagcagcgttggaaaatggaattaaaaatgaggaaaacacagaaccaggtgctgaatcttctgagaacgctgatgatcccaacaaagatacaagtgaaaacgcagatggtcaaagtgatgagaacaaggacgactatacaatcccagatgagtatagaattggaccatatc

SEQ ID NO: 1715 - DNA, 333 bp, Homo sapiens
ggccgtcgggtgtgagctgcgccgaccgctctgagggttcgtggcccaccgctccttcgcggtccctgccgccaccgtccacgctcagcgttgtagagaagatggtgggtcggaacagcgccatcgccgccggtgtatgcggggcccttttcattgggtactgcatctacttcgaccgcaaaagacgaagtgaccccaacttcaagaacaggcttcgagaacgaagaaagaaacagaagcttgccaaggagagagctgggctttccaagttacctgaccttaaagatgctgaagctgttcagaagttcttccttgaagaaatacagcttggtg

SEQ ID NO: 1716 - DNA, 36 bp, Homo sapiens
cagaaagagcttgctcagggatttttagctaatcag

SEQ ID NO: 1717 - DNA, 500 bp, Homo sapiens
cgaccatttatagcagaatgccgtcaaactattgccaaacttgataatcagaatatgaaagccattaaaggacttgaagatcggctctacgccctggaccagatgattgctagctgtggccgactggtgaatgaacagaaagagcttgctcagggatttttagctaatcagaagagagctgaaaacttaaaggatgcatctgtattacctgatttatgcctgagtcacgcaaatcagttgatgattatgttgcaaaatcatagaaaactgttagatattaagcagaagtgtaccactgccaaacaagaactagcaaataacctacatgtcagactgaagtggtgttgctttgtaatgcttcatgctgatcaagatggagagaagttacaagctttgctccgcctcgtaatagagctgttagaaagagtcaaaattgttgaagctcttagtacagttcctcagatgtactgcttagctgttgttgaggttgtaagaagaaa

SEQ ID NO: 1718 - DNA, 135 bp, Homo sapiens
cgaccatttatagcagaatgccgtcaaactattgccaaacttgataatcagaatatgaaagccattaaaggacttgaagatcggctctacgccctggaccagatgattgctagctgtggccgactggtgaatgaa

SEQ ID NO: 1719 - DNA, 149 bp, Homo sapiens
aagagagctgaaaacttaaaggatgcatctgtattacctgatttatgcctgagtcacgcaaatcagttgatgattatgttgcaaaatcatagaaaactgttagatattaagcagaagtgtaccactgccaaacaagaactagcaaataa

SEQ ID NO: 1720 - DNA, 500 bp, Homo sapiens
gactggattctttacctgaacatgaagactcagaaaaagctgagacgaaaagatccactgaactggtgctctctcctgatatgcctagaacaactaacgaatctttgttaacctcatttcccaagtcagtggaacatgtgtccccagataccgcagatgctgaaagtggcaaagaaattagggaatcttgtcaaagtactgttcatcagcaagatgaaactacgattgacactaaagatggtgatctgcccttttttaatgtctctttgttagactggataaatgttcaagatagacctaatgatgtggaatctttggtcaggaagtgctttgattctatgagcaggcttgatccaaggattattcgaccatttatagcagaatgccgtcaaactattgccaaacttgataatcagaatatgaaagccattaaaggacttgaagatcggctctacgccctggaccagatgattgctagctgtggccgactggtgaatgaa

SEQ ID NO: 1721 - DNA, 500 bp, Homo sapiens
tcttgtcaaagtactgttcatcagcaagatgaaactacgattgacactaaagatggtgatctgcccttttttaatgtctctttgttagactggataaatgttcaagatagacctaatgatgtggaatctttggtcaggaagtgctttgattctatgagcaggcttgatccaaggattattcgaccatttatagcagaatgccgtcaaactattgccaaacttgataatcagaatatgaaagccattaaaggacttgaagatcggctctacgccctggaccagatgattgctagctgtggccgactggtgaatgaacagaaagagcttgctcagggatttttagctaatcagaagagagctgaaaacttaaaggatgcatctgtattacctgatttatgcctgagtcacgcaaatcagttgatgattatgttgcaaaatcatagaaaactgttagatattaagcagaagtgtaccactgccaaacaagaactagcaaataa

SEQ ID NO: 1722 - DNA, 68 bp, Homo sapiens
tttgactgtgaacttccagatatttcattaaaagatttacagtttctgcaatcattttgtccttcgga

SEQ ID NO: 1723 - DNA, 25 bp, Homo sapiens
gttgtctgaagaaaaacagcggata

SEQ ID NO: 1724 - DNA, 496 bp, Homo sapiens
cgaagcagggcgccgagtccatgcgaactgccatctgatccgctcttatcaatgaagcagccgatcatggcggatggcccccggtgcaagaggcgcaaacaagccaatcccaggaggaaaaacgtggtgaactatgacaatgtagtggacacaggttctgaaacagatgaggaagacaagcttcatattgctgaggatgacggtattgccaaccctctggaccaggagacgagtccagctagtgtgcccaaccatgagtcctccccacacgtgagccaagctctgttgccaagagaggaagaggaagatgaaataagggagggtggagtggaacacccctggcacaacaacgagattctacaagcctctgtagatggtccagaagaaatgaaggaagactatgacactatggggccagaagccacgatccagaccgcaattaacaatggtacagtgaagaatgcaaattgcacatcagattttgaggaatactttg

SEQ ID NO: 1725 - DNA, 72 bp, Homo sapiens
cttcaccctgacggccttcgtcgagctgatggaccatggcatagtgtcctgggatacattttcggtggcgtt

SEQ ID NO: 1726 - DNA, 500 bp, Homo sapiens
ttcagcaaatgactttcaggtatttaaacaacacagacgaacccatagaagcactttagtaaaatgtgacatttgtaacaatgagagtgtatatactttactgaacttgacaaagcatttcacatccacacattgtgttaatggtaattttcaatgtgaaaagtgtaagttctccacccaggatgttggcacatttgttcagcacattcatagacataatgaaattcattataagtgtggtaaatgtcatcatgtatgttttaccaaaggagagcttcagaagcaccttcatattcattctggtacttttcccttcacttgtcaatattgtagctatggtgccaccaggagagaacaccttgtaagacatgttataactttgcacaaagaacatttatatgcaaaagaaaaactggaaaaagacaaatatgaaaaaagaatggcaaagacttctgcaggacttaagctaatactgaaaagatataaaataggtgcatcaa

SEQ ID NO: 1727 - DNA, 179 bp, Homo sapiens
gcatgggacagcctggcacaatgaagaattagccctcccaaaatgtagattattttatttcaagggatagggcagattaccattagaagcaaaattaaaagtacaagctgggcaaactgacagaatactagataggagagactaattccaaccttctaaatttggctagtaaagtgcaa

SEQ ID NO: 1728 - DNA, 124 bp, Homo sapiens
tctcgctccggagccgctgcacatttcggaatcttctgcggcttgtccatagtgtgaataaaaactaaatcacatctataattctactgaactggtcatacagacgctgccatatatgtcacag

SEQ ID NO: 1729 - DNA, 36 bp, Homo sapiens
tcctacctccgagcaaaactgtgttgcccactgtgc

SEQ ID NO: 1730 - DNA, 500 bp, Homo sapiens
aagcattaagaagacagaatggtccagagaagaagaggaaaaactcttgcacttggccaagttgatgccaactcagtggaggaccattgctccaatcattggaagaacagcggcccagtgcttagaacactatgaatttcttctggataaagctgcccaaagagacaatgaagaggaaacaacagatgatccacgaaaacttaaacctggagaaatagatccaaatccagaaacaaaaccagcgcggcctgatccaattgatatggatgaggatgaacttgagatgctttctgaagccagagcccgcttggctaatactcagggaaagaaggccaagaggaaagcaagagagaaacaattggaagaagcaagacgtcttgctgccctccaaaaaagaagagaacttcgagcagctggcatagaaattcagaagaaaagaaaaaggaagagaggagttgattataatgccgaaatcccatttgaaaaaaagcctgcccttg

SEQ ID NO: 1731 - DNA, 500 bp, Homo sapiens
tagaaaaaaagacaaacagcatttgaaaaggaaaaaagaatctgatttaccatcagctattcttcaaactagtggtgtttctgaatttactaaaaagagaagcaaactagtacttcctgcccctcagatttcagatgcagaactccaggaagttgtaaaagtaggccaagcgagtgaaattgcacgtcaaactgccgaggaatctggcataacaaattctgcttccagtacacttttgtctgagtacaatgtcaccaacaacagcgttgctcttagaacaccacgaacaccagcttcccaggacagaattctgcaggaagcccagaacctcatggccctcaccaatgtggacaccccattgaaaggtggacttaataccccattgcatgagagtgacttctcaggtgtaactccacagcgacaagttgtacagactccaaacacagttctctctactccattcaggactccttctaatggagctgaagggctgactcccc

SEQ ID NO: 1732 - DNA, 500 bp, Homo sapiens
gagcagctggcatagaaattcagaagaaaagaaaaaggaagagaggagttgattataatgccgaaatcccatttgaaaaaaagcctgcccttggtttttatgatacttctgaggaaaactaccaagctcttgacgcagatttcaggaaattaagacaacaggatcttgatggggagctaagatctgaaaaagaaggaagagatagaaaaaaagacaaacagcatttgaaaaggaaaaaagaatctgatttaccatcagctattcttcaaactagtggtgtttctgaatttactaaaaagagaagcaaactagtacttcctgcccctcagatttcagatgcagaactccaggaagttgtaaaagtaggccaagcgagtgaaattgcacgtcaaactgccgaggaatctggcataacaaattctgcttccagtacacttttgtctgagtacaatgtcaccaacaacagcgttgctcttagaacaccacgaacaccagcttcc

SEQ ID NO: 1733 - DNA, 500 bp, Homo sapiens
gacattcagcatttgagcccctggtggccaatggagtccccgcttcttttgtgcctaagcctgggtctctgaagagaggcctcaattctcagagctcagatgaccacttgaataagagatcccgaagctcttccatgagctccttgacaggcgcttacgcaagtggcatccctagctccagccgcaatgccattaccagttcctacagctccactcgaggcatctcacagctctggaagagaaatggccccagttcatcacccttctctagcccagcctcctcccgctcccagacaccggagaggccagcaaagaaaataagagaagaggagctgtgtcatcattccagttcttcaactccattggcagcagacagggagtcccagggagaaaaggctgcagatacaaccccaaggaagaaacaaaactcgaattctcagtctacacctggcagctctgggcagcgtaagcggaaagttcagctgctgccttctcggcga

SEQ ID NO: 1734 - DNA, 36 bp, Homo sapiens
gctgtattactgctgcatatgccagaggaacaagca

SEQ ID NO: 1735 - DNA, 361 bp, Homo sapiens
catagccatttttctgatctgaacctggaagctcatatgtatgcatcccagtggtttctcactctttttactgccaagttcccactctgcatggtgttccacatcattgacttactgctttgtgagggtttgaacataatctttcatgtagctttggctctcctaaagacctcaaaggaagaccttctgcaggctgattttgaaggtgctttaaagttctttagagttcagcttccaaagagatacagggcagaggaaaatgcaagaagactgatggagcaggcttgcaatattaaagtaccaaccaagaagctgaagaaatatgagaaagaatatcagacaatgcgagagagtcagctgc

SEQ ID NO: 1736 - DNA, 36 bp, Homo sapiens
aactccaatggcccaaaaggaagctgtgattaagca

SEQ ID NO: 1737 - DNA, 36 bp, Homo sapiens
gcttttctgcacatcaagacaggtgaatggaaaaaa

SEQ ID NO: 1738 - DNA, 500 bp, Homo sapiens
agtcaatgccatcatcctaatattgtatcttactacacatcttttgtggtaaaagatgagctgtggcttgtcatgaagctgctaagtggaggttctgttctggatattattaagcacattgtggcaaaaggggaacacaaaagtggagtcctagatgaatctaccattgctacgatactccgagaagtactggaagggctggaatatctgcataaaaatggacagatccacagagatgtgaaagctggaaacattcttcttggagaagatggctcagtacagattgcagactttggggttagtgcttttttagcaactggtggtgatattacccgaaataaagtgagaaagacctttgttggcaccccttgttggatggcacctgaagttatggaacaggtccgtggttatgatttcaaagctgatatttggagttttggaattacagcaattgaattggctacaggggcggctccttatcataaatatccaccaatgaa

SEQ ID NO: 1739 - DNA, 500 bp, Homo sapiens
gctgttgggggtggggagacgcgcggcgaggagacgagcgaggtcagcgagtttgagggaggaccgcgagccgctgccgccgtcatgtccgaggactcgagcgccctgccctggtccatcaacagggacgattacgagctgcaggaggtgatcgggagtggagcaactgctgtagtccaagcagcttattgtgcccctaaaaaggagaaagtggcaatcaaacggataaaccttgagaaatgtcaaactagcatggatgaactcctgaaagaaattcaagccatgagtcaatgccatcatcctaatattgtatcttactacacatcttttgtggtaaaagatgagctgtggcttgtcatgaagctgctaagtggaggttctgttctggatattattaagcacattgtggcaaaaggggaacacaaaagtggagtcctagatgaatctaccattgctacgatactccgagaagtactggaagggctggaatatctgcataa

SEQ ID NO: 1740 - DNA, 36 bp, Homo sapiens
cctctccggagtcctcaggtttgccaataggattat

SEQ ID NO: 1741 - DNA, 93 bp, Homo sapiens
gttaatgaagcagaatcagcaagagaacagttacaggatctgcatgaccaaatagctgggcagaaagcatccaaacaagaactagagacagaa

SEQ ID NO: 1742 - DNA, 36 bp, Homo sapiens
actctggacttctcaaagatggtgatgcccagtcac

SEQ ID NO: 1743 - DNA, 36 bp, Homo sapiens
atgaactcagctattcagtgtttgagcaacacacct

SEQ ID NO: 1744 - DNA, 189 bp, Homo sapiens
tgggaaaaccatttaaaacgaaatgattctatcatagtagatatatttcatggccttttcaaatcaactttagtttgtcctgagtgtgctaagatttcagtaacatttgatcctttttgttacttgacacttccattgcccatgaaaaaagaacgcaccttggaagtttacttagttagaatggatccg

SEQ ID NO: 1745 - DNA, 500 bp, Homo sapiens
atgaagatggaacatggccaaggggtccttctactcctaatgtgaaaaactcaaattactgtcttccatcatataccgcttataagaactatgattattcggaacctggaagaaacaatgaacagccaggcctctgtggcctaagtaacttgggaaatacgtgtttcatgaactcagctattcagtgtttgagcaacacacctccacttactgagtatttcctcaatgataagtatcaagaagaactgaattttgacaatcccttaggaatgagaggtgaaatagctaaatcttatgccgaactgatcaagcaaatgtggtctggaaagtttagctacgtcaccccaagagcctttaagacacaggtaggacgttttgcacctcagttctctggatatcagcagcaagactgtcaagaactgttagctttcctattagatggattacatgaggatttgaatagaattaggaaaaaaccatatatacaattaaaagatgca

SEQ ID NO: 1746 - DNA, 36 bp, Homo sapiens
atgaactcagctattcagttaccggtttactaaaat

SEQ ID NO: 1747 - DNA, 66 bp, Homo sapiens
tacaaagtggttgtccccaaaattggaaacatattagatctttgtacagcattgtctgctttgtca

SEQ ID NO: 1748 - DNA, 500 bp, Homo sapiens
agaacatcagcaagccacaaagaaattggatttatggtccctgcctccagtacttgtagtacatctcaagcgattttcttacagtcgatacatgagagacaagttggataccttagttgattttcctatcaatgacttggatatgtcggaattcttaattaatccaaatgcaggtccttgccgctataatctgattgctgtttccaaccactatggagggatgggaggaggacactatactgcttttgcaaaaaataaagatgatggaaaatggtactattttgatgacagtagtgtctccactgcatctgaagaccaaattgtgtccaaagcagcatatgtactcttctaccagagacaagacactttcagtggaactggcttttttcctcttgaccgagaaactaaaggtgcttcagctgccactggcatcccattagaaagtgatgaagatagcaatgataatgacaatgatatagaaaatgaaaactgtatgcaca

SEQ ID NO: 1749 - DNA, 500 bp, Homo sapiens
attcttaattaatccaaatgcaggtccttgccgctataatctgattgctgtttccaaccactatggagggatgggaggaggacactatactgcttttgcaaaaaataaagatgatggaaaatggtactattttgatgacagtagtgtctccactgcatctgaagaccaaattgtgtccaaagcagcatatgtactcttctaccagagacaagacactttcagtggaactggcttttttcctcttgaccgagaaactaaaggtgcttcagctgccactggcatcccattagaaagtgatgaagatagcaatgataatgacaatgatatagaaaatgaaaactgtatgcacactaactaatgaaagtcctagaagccataaaagagacactttcctgctggtggtatctatggaaatgatgaagttacccaccacattaaaacaaaagtctgagatggggagtttcagataaccgaatgtaaatcctttatcagattttaac

SEQ ID NO: 1750 - DNA, 36 bp, Homo sapiens
ctgattaaaagaagcacggtatgatgaccaaacata

SEQ ID NO: 1751 - DNA, 500 bp, Homo sapiens
cagttctggaaggatacgtggttaagtaccactcctggatgaatcagaaaaacagccacttgagcaatttcgtgttctgtggttcagatgagaatcccagttgagaaagtaagaaaatatgtgtttattcttcagctttaaattgttatatcacaaacttccttcctccttggcaagctttcttttttgacgagaagaaaattgtaataaacaacagtatgactaatagatagtcacatggttacttccagtttgcaaaatgctatttatactttgagttactcttcaaaagtggtatacctctagtttggagctgtgctgtaaaaacaagagtaacatttttatattaaagttaaataaagttacaactttgaagagagtttctgcaagacatgacacaaagctgctagcagaaaatcaaaacgctgattaaaagaagcacggtatgatgaccaaacataaaaagtgttttataattgttggtgttttaataacaacta

SEQ ID NO: 1752 - DNA, 500 bp, Homo sapiens
cctccttggcaagctttcttttttgacgagaagaaaattgtaataaacaacagtatgactaatagatagtcacatggttacttccagtttgcaaaatgctatttatactttgagttactcttcaaaagtggtatacctctagtttggagctgtgctgtaaaaacaagagtaacatttttatattaaagttaaataaagttacaactttgaagagagtttctgcaagacatgacacaaagctgctagcagaaaatcaaaacgctgattaaaagaagcacggtatgatgaccaaacataaaaagtgttttataattgttggtgttttaataacaactaatattattactctgatagttaaactaactcgagattctcagagtttatgcccctatgattggattggtttccaaaacaaatgctattatttctctaaagaagaaggagattggaattcaagtaaatacaactgttccactcaacatgccgacctaactataatt

SEQ ID NO: 1753 - DNA, 228 bp, Homo sapiens
agaccgtgtgtttccaaaatggcggcagcgatggatgtggataccccgagcggcaccaacagcggcgcgggcaagaagcgctttgaagtgaaaaagtggaatgcagtagccctctgggcctgggatattgtggttgataactgtgccatctgcaggaaccacattatggatctttgcatagaatgtcaagctaaccaggcgtccgctacttcagaagagtgtactgtc

SEQ ID NO: 1754 - DNA, 36 bp, Homo sapiens
ttcttataccattttcaggaaagatcgcaaaatggc

SEQ ID NO: 1755 - DNA, 23 bp, Homo sapiens
ggacggacctgatacgactgaag

SEQ ID NO: 1756 - DNA, 25 bp, Homo sapiens
ggtgaaggaggtgatgaaggtgaca

SEQ ID NO: 1757 - DNA, 25 bp, Homo sapiens
acggttatgatgacgatggtgacaa

SEQ ID NO: 1758 - DNA, 25 bp, Homo sapiens
ggtgaaggaggtgatgaaggtgaca

SEQ ID NO: 1759 - DNA, 25 bp, Homo sapiens
acggttatgatgacgatggtgacaa

SEQ ID NO: 1760 - DNA, 23 bp, Homo sapiens
accgcttccacatccgtgtcgtt

SEQ ID NO: 1761 - DNA, 25 bp, Homo sapiens
ccaagaacagtggtcttagtcctcc

SEQ ID NO: 1762 - DNA, 24 bp, Homo sapiens
ggaaacacccgtcttagagcctcg

SEQ ID NO: 1763 - DNA, 25 bp, Homo sapiens
ggacacggtgacacaataatgagcc

SEQ ID NO: 1764 - DNA, 24 bp, Homo sapiens
ggacgcgacatggactctacgaaa

SEQ ID NO: 1765 - DNA, 24 bp, Homo sapiens
gacgcgacatggactctacgaaaa

SEQ ID NO: 1766 - DNA, 24 bp, Homo sapiens
aggacgcgacatggactctacgaa

SEQ ID NO: 1767 - DNA, 23 bp, Homo sapiens
agcggttacaaaaataggtaagg

SEQ ID NO: 1768 - DNA, 24 bp, Homo sapiens
gccttccgaagtatgcgaaataac

SEQ ID NO: 1769 - DNA, 23 bp, Homo sapiens
atgacgtcttagagataggtacg

SEQ ID NO: 1770 - DNA, 25 bp, Homo sapiens
cacactgtctacactacctaccacg

SEQ ID NO: 1771 - DNA, 25 bp, Homo sapiens
ccacagaaggagtagagacgtgtca

SEQ ID NO: 1772 - DNA, 25 bp, Homo sapiens
gcccagagagacctcacgatacatt

SEQ ID NO: 1773 - DNA, 24 bp, Homo sapiens
tcgagtaacatcgcagaaaagacg

SEQ ID NO: 1774 - DNA, 24 bp, Homo sapiens
cgagtaacatcgcagaaaagacgg

SEQ ID NO: 1775 - DNA, 24 bp, Homo sapiens
atcgagtaacatcgcagaaaagac

SEQ ID NO: 1776 - DNA, 24 bp, Homo sapiens
ccaccagcttgtgactttactaat

SEQ ID NO: 1777 - DNA, 24 bp, Homo sapiens
caccagcttgtgactttactaatt

SEQ ID NO: 1778 - DNA, 24 bp, Homo sapiens
tccaccagcttgtgactttactaa

SEQ ID NO: 1779 - DNA, 25 bp, Homo sapiens
gtaacctaaacggtgacggtaaacc

SEQ ID NO: 1780 - DNA, 23 bp, Homo sapiens
aaacacgagctatcggtttgtgt

SEQ ID NO: 1781 - DNA, 25 bp, Homo sapiens
tgagacttacaggaacacaagtagt

SEQ ID NO: 1782 - DNA, 25 bp, Homo sapiens
tacctaaagtcttcacgacgagcaa

SEQ ID NO: 1783 - DNA, 25 bp, Homo sapiens
ccagaacctaccggaagaactcctt

SEQ ID NO: 1784 - DNA, 25 bp, Homo sapiens
cctcggttacacagtggtagatcgg

SEQ ID NO: 1785 - DNA, 23 bp, Homo sapiens
ctaccgaggaagagaccgcctgt

SEQ ID NO: 1786 - DNA, 23 bp, Homo sapiens
cacagccacgacatcaccacgac

SEQ ID NO: 1787 - DNA, 24 bp, Homo sapiens
ttattcgggacccatcttcgtagg

SEQ ID NO: 1788 - DNA, 25 bp, Homo sapiens
cctcggttacacagtggtagatcgg

SEQ ID NO: 1789 - DNA, 25 bp, Homo sapiens
cgggaatctcagacttcgtcatcca

SEQ ID NO: 1790 - DNA, 25 bp, Homo sapiens
accgaggacagtaagagtagaccgt

SEQ ID NO: 1791 - DNA, 25 bp, Homo sapiens
cgagattgaggacgagtcacttcta

SEQ ID NO: 1792 - DNA, 25 bp, Homo sapiens
cttgcgttacgagaggtcttggtga

SEQ ID NO: 1793 - DNA, 23 bp, Homo sapiens
cggtgttacgcaggctgtttgaa

SEQ ID NO: 1794 - DNA, 25 bp, Homo sapiens
ttcatcgtgaggtcttctgccaaca

SEQ ID NO: 1795 - DNA, 25 bp, Homo sapiens
tccactccagtatcggatcacacct

SEQ ID NO: 1796 - DNA, 25 bp, Homo sapiens
accgaggacagtaagagtagaccgt

SEQ ID NO: 1797 - DNA, 25 bp, Homo sapiens
cgagattgaggacgagtcacttcta

SEQ ID NO: 1798 - DNA, 23 bp, Homo sapiens
gctacagttaccacccgtcagga

SEQ ID NO: 1799 - DNA, 24 bp, Homo sapiens
tgatatcgcgaggactttttgttt

SEQ ID NO: 1800 - DNA, 24 bp, Homo sapiens
gatatcgcgaggactttttgtttc

SEQ ID NO: 1801 - DNA, 24 bp, Homo sapiens
ttgatatcgcgaggactttttgtt

SEQ ID NO: 1802 - DNA, 23 bp, Homo sapiens
ccaacctggacaagcctcgaaag

SEQ ID NO: 1803 - DNA, 24 bp, Homo sapiens
aacgcaatactactccgccgacaa

SEQ ID NO: 1804 - DNA, 25 bp, Homo sapiens
ccagacgacgactaggttatgacaa

SEQ ID NO: 1805 - DNA, 25 bp, Homo sapiens
gacttattcatacggttcggcttca

SEQ ID NO: 1806 - DNA, 24 bp, Homo sapiens
gaagctctccagcgaagtaacgaa

SEQ ID NO: 1807 - DNA, 24 bp, Homo sapiens
ggtgtttggtcggtagcagtgtga

SEQ ID NO: 1808 - DNA, 24 bp, Homo sapiens
gcaaggcttaaagacccaggaggc

SEQ ID NO: 1809 - DNA, 23 bp, Homo sapiens
ggtaggaccgaccgaggttcaac

SEQ ID NO: 1810 - DNA, 25 bp, Homo sapiens
cgtggtaggaaggaagactgttata

SEQ ID NO: 1811 - DNA, 25 bp, Homo sapiens
cgtgaattgacctggttaagaagac

SEQ ID NO: 1812 - DNA, 25 bp, Homo sapiens
ccgatgagaacctgtcctagaacga

SEQ ID NO: 1813 - DNA, 23 bp, Homo sapiens
ccctatactgtttgactgtagaa

SEQ ID NO: 1814 - DNA, 23 bp, Homo sapiens
catcccgaacttaaaggttgtac

SEQ ID NO: 1815 - DNA, 25 bp, Homo sapiens
agaggagtagaggtaaagcgtggtt

SEQ ID NO: 1816 - DNA, 25 bp, Homo sapiens
cgaggaggagtaacagtgacagtgg

SEQ ID NO: 1817 - DNA, 25 bp, Homo sapiens
cgaagagaaggagtgagagttcaga

SEQ ID NO: 1818 - DNA, 24 bp, Homo sapiens
tcttgtcctccaggtgttagttca

SEQ ID NO: 1819 - DNA, 24 bp, Homo sapiens
aaggtactcacttcgtcttctcgt

SEQ ID NO: 1820 - DNA, 24 bp, Homo sapiens
gaacttcatttccgtcactcttaa

SEQ ID NO: 1821 - DNA, 24 bp, Homo sapiens
tcctgtgaatcttagtcctctacg

SEQ ID NO: 1822 - DNA, 25 bp, Homo sapiens
tcgtcgctagattcattctgtgtaa

SEQ ID NO: 1823 - DNA, 25 bp, Homo sapiens
gtttcccgacaaatgtatcacccgt

SEQ ID NO: 1824 - DNA, 23 bp, Homo sapiens
ggacagtggtaagatcacgttgt

SEQ ID NO: 1825 - DNA, 25 bp, Homo sapiens
aacggaagtttaggagtcagtgtct

SEQ ID NO: 1826 - DNA, 23 bp, Homo sapiens
taagagagtcccgagatacattt

SEQ ID NO: 1827 - DNA, 23 bp, Homo sapiens
cgacccttccgcctctaggtcat

SEQ ID NO: 1828 - DNA, 25 bp, Homo sapiens
aagaaccagatcgtctcggaagtcg

SEQ ID NO: 1829 - DNA, 25 bp, Homo sapiens
tgcgacagatacagctaatccgacg

SEQ ID NO: 1830 - DNA, 24 bp, Homo sapiens
aaaccaagtccggaagtgaaggtc

SEQ ID NO: 1831 - DNA, 24 bp, Homo sapiens
aaccaagtccggaagtgaaggtcg

SEQ ID NO: 1832 - DNA, 24 bp, Homo sapiens
aaaaccaagtccggaagtgaaggt

SEQ ID NO: 1833 - DNA, 23 bp, Homo sapiens
ggtctgttcctacgactgcttgc

SEQ ID NO: 1834 - DNA, 25 bp, Homo sapiens
ccactggcacttgctctacttctcc

SEQ ID NO: 1835 - DNA, 25 bp, Homo sapiens
cctcctgaacgacttcctctattgg

SEQ ID NO: 1836 - DNA, 23 bp, Homo sapiens
tctgccactgactctgacctgcc

SEQ ID NO: 1837 - DNA, 23 bp, Homo sapiens
taaagaaccgccactacccgagc

SEQ ID NO: 1838 - DNA, 25 bp, Homo sapiens
acacgaagaacacgaagaataggaa

SEQ ID NO: 1839 - DNA, 25 bp, Homo sapiens
cacctcctgaactcctccagactcc

SEQ ID NO: 1840 - DNA, 23 bp, Homo sapiens
cccactactgctgcgaggagaag

SEQ ID NO: 1841 - DNA, 23 bp, Homo sapiens
tctgccactgactctgacctgcc

SEQ ID NO: 1842 - DNA, 24 bp, Homo sapiens
tcgactctgtcagactcttggacg

SEQ ID NO: 1843 - DNA, 24 bp, Homo sapiens
cgactctgtcagactcttggacga

SEQ ID NO: 1844 - DNA, 24 bp, Homo sapiens
gtcgactctgtcagactcttggac

SEQ ID NO: 1845 - DNA, 25 bp, Homo sapiens
ctgttcgtgatgtgaaaacctgtcg

SEQ ID NO: 1846 - DNA, 23 bp, Homo sapiens
agactagtactacgcgtgtggag

SEQ ID NO: 1847 - DNA, 25 bp, Homo sapiens
cgtagacaacatggtagggacctcg

SEQ ID NO: 1848 - DNA, 25 bp, Homo sapiens
actgaagaggctacacatcactcca

SEQ ID NO: 1849 - DNA, 25 bp, Homo sapiens
acggtgtaagaagtgtaaacatccc

SEQ ID NO: 1850 - DNA, 25 bp, Homo sapiens
actgaagagactacacgttactcca

SEQ ID NO: 1851 - DNA, 25 bp, Homo sapiens
cgtgttattctaacctccttgctca

SEQ ID NO: 1852 - DNA, 24 bp, Homo sapiens
ttccatacttgatgtcgctttccg

SEQ ID NO: 1853 - DNA, 25 bp, Homo sapiens
acaactcattccgtacttgatgcca

SEQ ID NO: 1854 - DNA, 25 bp, Homo sapiens
gagaggtcatactcaagcggctacg

SEQ ID NO: 1855 - DNA, 25 bp, Homo sapiens
agaagtgtaaacatcccagagaccg

SEQ ID NO: 1856 - DNA, 25 bp, Homo sapiens
actgaagagactacacatcactcca

SEQ ID NO: 1857 - DNA, 25 bp, Homo sapiens
actagaactacgtcgagtctcagtg

SEQ ID NO: 1858 - DNA, 24 bp, Homo sapiens
gacggagtgatcgacctgaggaag

SEQ ID NO: 1859 - DNA, 24 bp, Homo sapiens
cctctgtaagcatagcccatgaaa

SEQ ID NO: 1860 - DNA, 24 bp, Homo sapiens
acagtgagggtggaccccagaaac

SEQ ID NO: 1861 - DNA, 24 bp, Homo sapiens
cagtgagggtggaccccagaaacc

SEQ ID NO: 1862 - DNA, 24 bp, Homo sapiens
tacagtgagggtggaccccagaaa

SEQ ID NO: 1863 - DNA, 24 bp, Homo sapiens
attacccagaacaggcggaaacgg

SEQ ID NO: 1864 - DNA, 24 bp, Homo sapiens
agcgttgtagtggttacctgtccg

SEQ ID NO: 1865 - DNA, 24 bp, Homo sapiens
aagtggtccgacgaacagtagacg

SEQ ID NO: 1866 - DNA, 23 bp, Homo sapiens
aacagaccgcacctcatccgagc

SEQ ID NO: 1867 - DNA, 25 bp, Homo sapiens
ttgtgaagacgaagtggtccgagtg

SEQ ID NO: 1868 - DNA, 25 bp, Homo sapiens
cctatactcgggtgtaagaggttcc

SEQ ID NO: 1869 - DNA, 25 bp, Homo sapiens
tggttttaccgactttgtaacacct

SEQ ID NO: 1870 - DNA, 25 bp, Homo sapiens
tgactataaaaacggtgtagaaggt

SEQ ID NO: 1871 - DNA, 25 bp, Homo sapiens
tagtagcaatcttcaggtcgaacgg

SEQ ID NO: 1872 - DNA, 25 bp, Homo sapiens
tgtagtaagtgacccgtaagtcttc

SEQ ID NO: 1873 - DNA, 25 bp, Homo sapiens
tagattaactggataggcgtgttcg

SEQ ID NO: 1874 - DNA, 25 bp, Homo sapiens
agtcagaacgacagtagtgtagaca

SEQ ID NO: 1875 - DNA, 25 bp, Homo sapiens
tagattaactggataggcgtgttcg

SEQ ID NO: 1876 - DNA, 25 bp, Homo sapiens
agtcagaacgacagtagtgtagaca

SEQ ID NO: 1877 - DNA, 24 bp, Homo sapiens
aaactaaagccaagagaatcggtc

SEQ ID NO: 1878 - DNA, 25 bp, Homo sapiens
tagattaactggataggcgtgttcg

SEQ ID NO: 1879 - DNA, 25 bp, Homo sapiens
agtcagaacgacagtagtgtagaca

SEQ ID NO: 1880 - DNA, 25 bp, Homo sapiens
taagaacaagtgtgagactaagact

SEQ ID NO: 1881 - DNA, 24 bp, Homo sapiens
gggatgacggtggatgtgcagggt

SEQ ID NO: 1882 - DNA, 24 bp, Homo sapiens
ggatgacggtggatgtgcagggtc

SEQ ID NO: 1883 - DNA, 24 bp, Homo sapiens
ggggatgacggtggatgtgcaggg

SEQ ID NO: 1884 - DNA, 25 bp, Homo sapiens
agggtcacctgttaaagggttcgtg

SEQ ID NO: 1885 - DNA, 25 bp, Homo sapiens
ccgagtgaactcctgtctgactact

SEQ ID NO: 1886 - DNA, 25 bp, Homo sapiens
cctgaaagtgtgagttaagacggtc

SEQ ID NO: 1887 - DNA, 25 bp, Homo sapiens
gcttcttcttagactagacgagggt

SEQ ID NO: 1888 - DNA, 25 bp, Homo sapiens
cgaaccacagtacaggtcacatctg

SEQ ID NO: 1889 - DNA, 25 bp, Homo sapiens
gtgtcttgtctgttctctgtaccgt

SEQ ID NO: 1890 - DNA, 23 bp, Homo sapiens
attttagtcggcgtgtgtctttt

SEQ ID NO: 1891 - DNA, 23 bp, Homo sapiens
tagcgatggtatgttccttcgtt

SEQ ID NO: 1892 - DNA, 23 bp, Homo sapiens
caagagtagggtatcccgtttag

SEQ ID NO: 1893 - DNA, 25 bp, Homo sapiens
tgttccgacctagaataaagaggca

SEQ ID NO: 1894 - DNA, 23 bp, Homo sapiens
tcgtctctccgttttcgaccgaa

SEQ ID NO: 1895 - DNA, 25 bp, Homo sapiens
agattttagtcggcgtgtgtctttt

SEQ ID NO: 1896 - DNA, 25 bp, Homo sapiens
ttgaatagcgatggtatgttccttc

SEQ ID NO: 1897 - DNA, 23 bp, Homo sapiens
gactacaagagtagggtatcccg

SEQ ID NO: 1898 - DNA, 24 bp, Homo sapiens
aggtcaaacatagacatggtattg

SEQ ID NO: 1899 - DNA, 24 bp, Homo sapiens
ggtcaaacatagacatggtattgg

SEQ ID NO: 1900 - DNA, 24 bp, Homo sapiens
caggtcaaacatagacatggtatt

SEQ ID NO: 1901 - DNA, 25 bp, Homo sapiens
gttgtacggaacggtttatatatcg

SEQ ID NO: 1902 - DNA, 23 bp, Homo sapiens
ggagtcctcgtagaccgtctgaa

SEQ ID NO: 1903 - DNA, 24 bp, Homo sapiens
gtaagaaacacacgagagcgaggt

SEQ ID NO: 1904 - DNA, 24 bp, Homo sapiens
caagaagcgtcaggtaaccaggca

SEQ ID NO: 1905 - DNA, 25 bp, Homo sapiens
gaacccatacctactccatcttcgg

SEQ ID NO: 1906 - DNA, 25 bp, Homo sapiens
acttcagcacctttaacctcagacg

SEQ ID NO: 1907 - DNA, 23 bp, Homo sapiens
ggagtcctcgtagaccgtctgaa

SEQ ID NO: 1908 - DNA, 25 bp, Homo sapiens
acgagagcgaggtgtgaattttgta

SEQ ID NO: 1909 - DNA, 25 bp, Homo sapiens
ttaacagatgagaagggtttgtaag

SEQ ID NO: 1910 - DNA, 25 bp, Homo sapiens
agttacaatcatcgacgaagaccac

SEQ ID NO: 1911 - DNA, 25 bp, Homo sapiens
agttgagtttcagtgcgtccaaagc

SEQ ID NO: 1912 - DNA, 25 bp, Homo sapiens
cttcgcttgtctatgtataagtcct

SEQ ID NO: 1913 - DNA, 25 bp, Homo sapiens
tcgacgaagaccacttcacgtagta

SEQ ID NO: 1914 - DNA, 25 bp, Homo sapiens
ttcggttaaccaacagattagagtt

SEQ ID NO: 1915 - DNA, 23 bp, Homo sapiens
cttcggaactggtcgtcggtcac

SEQ ID NO: 1916 - DNA, 25 bp, Homo sapiens
gactgaaacgggagagcgagaagac

SEQ ID NO: 1917 - DNA, 25 bp, Homo sapiens
gttacaatcatcgacgaagaccact

SEQ ID NO: 1918 - DNA, 25 bp, Homo sapiens
gactgaaacgggagagcgagaagac

SEQ ID NO: 1919 - DNA, 25 bp, Homo sapiens
gttacaatcatcgacgaagaccact

SEQ ID NO: 1920 - DNA, 25 bp, Homo sapiens
agttgagtttcagtgcgtccaaagc

SEQ ID NO: 1921 - DNA, 25 bp, Homo sapiens
gttacaatcatcgacgaagaccact

SEQ ID NO: 1922 - DNA, 25 bp, Homo sapiens
agttgagtttcagtgcgtccaaagc

SEQ ID NO: 1923 - DNA, 25 bp, Homo sapiens
cttcgcttgtctatgtataagtcct

SEQ ID NO: 1924 - DNA, 25 bp, Homo sapiens
gagcaaggaaaagtcggtgtcgtaa

SEQ ID NO: 1925 - DNA, 25 bp, Homo sapiens
aaaagatttcgtaggaaaagtcggt

SEQ ID NO: 1926 - DNA, 23 bp, Homo sapiens
tatcaaggttacaacggtagacg

SEQ ID NO: 1927 - DNA, 25 bp, Homo sapiens
ggactcatagtaaccttctctgact

SEQ ID NO: 1928 - DNA, 24 bp, Homo sapiens
ttgaatcgtggtccacttccagga

SEQ ID NO: 1929 - DNA, 23 bp, Homo sapiens
tatcaaggttacaacggtagacg

SEQ ID NO: 1930 - DNA, 24 bp, Homo sapiens
cgttgtctttaaccacaaggacct

SEQ ID NO: 1931 - DNA, 25 bp, Homo sapiens
actgttagatagtagtccattccta

SEQ ID NO: 1932 - DNA, 25 bp, Homo sapiens
ggactcatagtaaccttctctgact

SEQ ID NO: 1933 - DNA, 24 bp, Homo sapiens
ttgaatcgtggtccacttccagga

SEQ ID NO: 1934 - DNA, 25 bp, Homo sapiens
agaccaccaggtagactgtcaccaa

SEQ ID NO: 1935 - DNA, 24 bp, Homo sapiens
agcggatccagagagtttcgtcag

SEQ ID NO: 1936 - DNA, 24 bp, Homo sapiens
gcggatccagagagtttcgtcaga

SEQ ID NO: 1937 - DNA, 24 bp, Homo sapiens
gagcggatccagagagtttcgtca

SEQ ID NO: 1938 - DNA, 25 bp, Homo sapiens
cggggtgttaaaagtgtacgaggaa

SEQ ID NO: 1939 - DNA, 25 bp, Homo sapiens
tgaggtgtatcagaagtcagacccg

SEQ ID NO: 1940 - DNA, 25 bp, Homo sapiens
ggagtatgaatctcgtccgttgtcg

SEQ ID NO: 1941 - DNA, 25 bp, Homo sapiens
agtagtagtgatagacttgacgaga

SEQ ID NO: 1942 - DNA, 25 bp, Homo sapiens
tgaggtgtatcagaagtcagacccg

SEQ ID NO: 1943 - DNA, 25 bp, Homo sapiens
acaggaaactactgacagggtacag

SEQ ID NO: 1944 - DNA, 25 bp, Homo sapiens
ggagtatgaatctcgtccgttgtcg

SEQ ID NO: 1945 - DNA, 25 bp, Homo sapiens
ttgccattgtctccatcacggtagt

SEQ ID NO: 1946 - DNA, 25 bp, Homo sapiens
ggcgatactaccagacacctactta

SEQ ID NO: 1947 - DNA, 24 bp, Homo sapiens
tacttaacggaggtccaacggtct

SEQ ID NO: 1948 - DNA, 24 bp, Homo sapiens
gtcagaagtaggacatccaactac

SEQ ID NO: 1949 - DNA, 24 bp, Homo sapiens
tcagaagtaggacatccaactaca

SEQ ID NO: 1950 - DNA, 24 bp, Homo sapiens
ggtcagaagtaggacatccaacta

SEQ ID NO: 1951 - DNA, 24 bp, Homo sapiens
tactcgtgtaccgggtaactctcg

SEQ ID NO: 1952 - DNA, 24 bp, Homo sapiens
gggaccggaatggactggtggacg

SEQ ID NO: 1953 - DNA, 24 bp, Homo sapiens
ggaccggaatggactggtggacga

SEQ ID NO: 1954 - DNA, 24 bp, Homo sapiens
cgggaccggaatggactggtggac

SEQ ID NO: 1955 - DNA, 25 bp, Homo sapiens
tactatactatcggaccaggtgacc

SEQ ID NO: 1956 - DNA, 25 bp, Homo sapiens
tcctcggttgtataattggtgaaga

SEQ ID NO: 1957 - DNA, 25 bp, Homo sapiens
tgcgtgtcggacatatcactctgga

SEQ ID NO: 1958 - DNA, 25 bp, Homo sapiens
agagaaaccaaagtttaacggagga

SEQ ID NO: 1959 - DNA, 25 bp, Homo sapiens
aacagaacccttgaacctccacttt

SEQ ID NO: 1960 - DNA, 24 bp, Homo sapiens
ctactgctactgcgaggtggaagg

SEQ ID NO: 1961 - DNA, 25 bp, Homo sapiens
gagccgatgtcagttagagtagtgc

SEQ ID NO: 1962 - DNA, 24 bp, Homo sapiens
gacaggctccaggctatcaatgta

SEQ ID NO: 1963 - DNA, 24 bp, Homo sapiens
acaggctccaggctatcaatgtag

SEQ ID NO: 1964 - DNA, 24 bp, Homo sapiens
tgacaggctccaggctatcaatgt

SEQ ID NO: 1965 - DNA, 24 bp, Homo sapiens
aggtcctcgttagaagtgtgagaa

SEQ ID NO: 1966 - DNA, 25 bp, Homo sapiens
agtgacaggctccaggctatcaatg

SEQ ID NO: 1967 - DNA, 23 bp, Homo sapiens
ccaagggaagcggttagtgataa

SEQ ID NO: 1968 - DNA, 23 bp, Homo sapiens
cactgaagaccggctcgtcccaa

SEQ ID NO: 1969 - DNA, 24 bp, Homo sapiens
ttagtccgaagtcaagacaagaga

SEQ ID NO: 1970 - DNA, 24 bp, Homo sapiens
aaacagactgaggaagttttaggt

SEQ ID NO: 1971 - DNA, 24 bp, Homo sapiens
aacagactgaggaagttttaggtg

SEQ ID NO: 1972 - DNA, 24 bp, Homo sapiens
aaaacagactgaggaagttttagg

SEQ ID NO: 1973 - DNA, 25 bp, Homo sapiens
tgtagttactgacgacgaggaagga

SEQ ID NO: 1974 - DNA, 25 bp, Homo sapiens
aagaagtaatcgtaacggtgacagt

SEQ ID NO: 1975 - DNA, 23 bp, Homo sapiens
gagcgagaagttcggagtcgtgg

SEQ ID NO: 1976 - DNA, 25 bp, Homo sapiens
gtcaggtaagtgtctcacggacgag

SEQ ID NO: 1977 - DNA, 25 bp, Homo sapiens
gttaattaggaacaaccgctcgacg

SEQ ID NO: 1978 - DNA, 25 bp, Homo sapiens
acaagagtcttcgttcgaggttcag

SEQ ID NO: 1979 - DNA, 25 bp, Homo sapiens
gtcaggtaagtgtctcacggacgag

SEQ ID NO: 1980 - DNA, 25 bp, Homo sapiens
cgttaattaggaacaaccgctcgac

SEQ ID NO: 1981 - DNA, 25 bp, Homo sapiens
acaagagtcttcgttcgaggttcag

SEQ ID NO: 1982 - DNA, 24 bp, Homo sapiens
gcgaggaccagggaaccggaacgg

SEQ ID NO: 1983 - DNA, 24 bp, Homo sapiens
cgaggaccagggaaccggaacggg

SEQ ID NO: 1984 - DNA, 24 bp, Homo sapiens
agcgaggaccagggaaccggaacg

SEQ ID NO: 1985 - DNA, 25 bp, Homo sapiens
actgcctaccctacttcgtagaggt

SEQ ID NO: 1986 - DNA, 23 bp, Homo sapiens
cgtccgctcgtgaagggtgtctt

SEQ ID NO: 1987 - DNA, 25 bp, Homo sapiens
gtttcctacacatctaagaagggga

SEQ ID NO: 1988 - DNA, 25 bp, Homo sapiens
ccaacagaagttaggtagaaacggg

SEQ ID NO: 1989 - DNA, 25 bp, Homo sapiens
ggagaggactatccattatacgacg

SEQ ID NO: 1990 - DNA, 25 bp, Homo sapiens
gggtcatccacacaatttccgtcct

SEQ ID NO: 1991 - DNA, 24 bp, Homo sapiens
ctaaatccgtagcgaagcgagccg

SEQ ID NO: 1992 - DNA, 24 bp, Homo sapiens
taaatccgtagcgaagcgagccga

SEQ ID NO: 1993 - DNA, 24 bp, Homo sapiens
actaaatccgtagcgaagcgagcc

SEQ ID NO: 1994 - DNA, 25 bp, Homo sapiens
acagtcttagtgacggtcttctcgg

SEQ ID NO: 1995 - DNA, 24 bp, Homo sapiens
ccgagagcttcagagtggacagaa

SEQ ID NO: 1996 - DNA, 24 bp, Homo sapiens
gtagagacgacgacgacgagacaa

SEQ ID NO: 1997 - DNA, 25 bp, Homo sapiens
acctcgttgaacgaaaaaggagaaa

SEQ ID NO: 1998 - DNA, 23 bp, Homo sapiens
agccctgggtcaagaactggtcg

SEQ ID NO: 1999 - DNA, 23 bp, Homo sapiens
gtcaggtcctagtcggcggttag

SEQ ID NO: 2000 - DNA, 25 bp, Homo sapiens
aggaagaatttgaacggtaactaca

SEQ ID NO: 2001 - DNA, 23 bp, Homo sapiens
tcttcggacttcgactcgacacc

SEQ ID NO: 2002 - DNA, 23 bp, Homo sapiens
ttttataggttcgacaaaagtct

SEQ ID NO: 2003 - DNA, 25 bp, Homo sapiens
ccaaagtcactccaaattacgttgc

SEQ ID NO: 2004 - DNA, 23 bp, Homo sapiens
gtcaggtcctagtcggcggttag

SEQ ID NO: 2005 - DNA, 23 bp, Homo sapiens
gtggtggtccgtggtctcgtcag

SEQ ID NO: 2006 - DNA, 23 bp, Homo sapiens
gagaacaggtaggactccgaacc

SEQ ID NO: 2007 - DNA, 23 bp, Homo sapiens
ttacgcaaggcgaaggagacacc

SEQ ID NO: 2008 - DNA, 24 bp, Homo sapiens
ggacaacgacagtaagcccgatgc

SEQ ID NO: 2009 - DNA, 24 bp, Homo sapiens
ttccgccggttggacaaaacgtaa

SEQ ID NO: 2010 - DNA, 24 bp, Homo sapiens
tccgccggttggacaaaacgtaaa

SEQ ID NO: 2011 - DNA, 24 bp, Homo sapiens
gttccgccggttggacaaaacgta

SEQ ID NO: 2012 - DNA, 24 bp, Homo sapiens
caagaaccttcggaataaccgtgt

SEQ ID NO: 2013 - DNA, 24 bp, Homo sapiens
aagaaccttcggaataaccgtgta

SEQ ID NO: 2014 - DNA, 24 bp, Homo sapiens
acaagaaccttcggaataaccgtg

SEQ ID NO: 2015 - DNA, 24 bp, Homo sapiens
gcgtaagaacaggaaaccctttat

SEQ ID NO: 2016 - DNA, 24 bp, Homo sapiens
cgtaagaacaggaaaccctttatg

SEQ ID NO: 2017 - DNA, 24 bp, Homo sapiens
agcgtaagaacaggaaacccttta

SEQ ID NO: 2018 - DNA, 25 bp, Homo sapiens
tccagtgtataaccttgactccctc

SEQ ID NO: 2019 - DNA, 25 bp, Homo sapiens
aagcgtaagaacaggaaacccttta

SEQ ID NO: 2020 - DNA, 25 bp, Homo sapiens
accttgactccctcccagacaaact

SEQ ID NO: 2021 - DNA, 25 bp, Homo sapiens
gtagaacacacccacccataagcgt

SEQ ID NO: 2022 - DNA, 25 bp, Homo sapiens
agagaagtgaacggactagattacg

SEQ ID NO: 2023 - DNA, 24 bp, Homo sapiens
gtattgtgagtgagtaaggaaagg

SEQ ID NO: 2024 - DNA, 24 bp, Homo sapiens
tattgtgagtgagtaaggaaaggt

SEQ ID NO: 2025 - DNA, 24 bp, Homo sapiens
tgtattgtgagtgagtaaggaaag

SEQ ID NO: 2026 - DNA, 24 bp, Homo sapiens
acccagggttcagactcgttgagt

SEQ ID NO: 2027 - DNA, 24 bp, Homo sapiens
cccagggttcagactcgttgagtc

SEQ ID NO: 2028 - DNA, 24 bp, Homo sapiens
gacccagggttcagactcgttgag

SEQ ID NO: 2029 - DNA, 25 bp, Homo sapiens
tacacctagatacagcagaacctct

SEQ ID NO: 2030 - DNA, 25 bp, Homo sapiens
cagaaggagtcattagacggcaaga

SEQ ID NO: 2031 - DNA, 25 bp, Homo sapiens
tgtctcggtaggtggaagaatggaa

SEQ ID NO: 2032 - DNA, 24 bp, Homo sapiens
gtcagaggctccaagttaccacga

SEQ ID NO: 2033 - DNA, 24 bp, Homo sapiens
actaatcaacagggtaacgggtcg

SEQ ID NO: 2034 - DNA, 24 bp, Homo sapiens
ctgggtgtccgttgaagttactga

SEQ ID NO: 2035 - DNA, 25 bp, Homo sapiens
agaaccgtgtgagtatgaagactgg

SEQ ID NO: 2036 - DNA, 25 bp, Homo sapiens
acgaagaccagatccaagacagaac

SEQ ID NO: 2037 - DNA, 24 bp, Homo sapiens
ccgaccatcctcaacttcttaacc

SEQ ID NO: 2038 - DNA, 25 bp, Homo sapiens
ttgcttgaggtggaggtgacaatta

SEQ ID NO: 2039 - DNA, 25 bp, Homo sapiens
ggtgaaacgagggtgatgtactccg

SEQ ID NO: 2040 - DNA, 25 bp, Homo sapiens
aaggtgaccgaccattaatcgtacc

SEQ ID NO: 2041 - DNA, 25 bp, Homo sapiens
aaagttcacatccgaggtcaaacga

SEQ ID NO: 2042 - DNA, 25 bp, Homo sapiens
ttgcttgaggtggaggtgacaatta

SEQ ID NO: 2043 - DNA, 25 bp, Homo sapiens
ggtgaaacgagggtgatgtactccg

SEQ ID NO: 2044 - DNA, 25 bp, Homo sapiens
ggtgaaacgagggtgatgtactccg

SEQ ID NO: 2045 - DNA, 25 bp, Homo sapiens
aaggtgaccgaccattaatcgtacc

SEQ ID NO: 2046 - DNA, 25 bp, Homo sapiens
cgacgaaatgaaagtccgactacac

SEQ ID NO: 2047 - DNA, 24 bp, Homo sapiens
cgttactccccagactgtttgacc

SEQ ID NO: 2048 - DNA, 24 bp, Homo sapiens
gttactccccagactgtttgaccg

SEQ ID NO: 2049 - DNA, 24 bp, Homo sapiens
tcgttactccccagactgtttgac

SEQ ID NO: 2050 - DNA, 24 bp, Homo sapiens
tccttcttgtcctccaccttccga

SEQ ID NO: 2051 - DNA, 25 bp, Homo sapiens
tcagtgacatcggagtgacatacta

SEQ ID NO: 2052 - DNA, 23 bp, Homo sapiens
acctcgtcccaaccctctcactt

SEQ ID NO: 2053 - DNA, 24 bp, Homo sapiens
gtacgacggaagctagtccaggtc

SEQ ID NO: 2054 - DNA, 24 bp, Homo sapiens
tagttttcagaagaaacatcatgt

SEQ ID NO: 2055 - DNA, 25 bp, Homo sapiens
agtctagagaccgggattactacta

SEQ ID NO: 2056 - DNA, 25 bp, Homo sapiens
acaaggacatccgaactacgacttc

SEQ ID NO: 2057 - DNA, 25 bp, Homo sapiens
tgtttagagcgttaatatcccagca

SEQ ID NO: 2058 - DNA, 25 bp, Homo sapiens
cgtaaacattccaaacagaagcgac

SEQ ID NO: 2059 - DNA, 25 bp, Homo sapiens
acaaggacatccgaactacgacttc

SEQ ID NO: 2060 - DNA, 25 bp, Homo sapiens
cgtaaacattccaaacagaagcgac

SEQ ID NO: 2061 - DNA, 25 bp, Homo sapiens
tgtaagaagtgtaaccttgccagag

SEQ ID NO: 2062 - DNA, 25 bp, Homo sapiens
tgtttagagcgttaatatcccagca

SEQ ID NO: 2063 - DNA, 25 bp, Homo sapiens
cgtaaacattccaaacagaagcgac

SEQ ID NO: 2064 - DNA, 25 bp, Homo sapiens
tgtaagaagtgtaaccttgccagag

SEQ ID NO: 2065 - DNA, 25 bp, Homo sapiens
cgtaaacattccaaacagaagcgac

SEQ ID NO: 2066 - DNA, 25 bp, Homo sapiens
tgtaagaagtgtaaccttgccagag

SEQ ID NO: 2067 - DNA, 25 bp, Homo sapiens
accgtgaactttcaggagagtgaca

SEQ ID NO: 2068 - DNA, 23 bp, Homo sapiens
tgaaacactcgtgggtgaactag

SEQ ID NO: 2069 - DNA, 25 bp, Homo sapiens
cgtaaacattccaaacagaagcgac

SEQ ID NO: 2070 - DNA, 25 bp, Homo sapiens
taaagacacccgtttagggaaaggt

SEQ ID NO: 2071 - DNA, 23 bp, Homo sapiens
cgtaggaacgagaagtcggagaa

SEQ ID NO: 2072 - DNA, 25 bp, Homo sapiens
acaaggacatccgaactacgacttc

SEQ ID NO: 2073 - DNA, 25 bp, Homo sapiens
cgtaaacattccaaacagaagcgac

SEQ ID NO: 2074 - DNA, 25 bp, Homo sapiens
tgtaagaagtgtaaccttgccagag

SEQ ID NO: 2075 - DNA, 25 bp, Homo sapiens
accgtgaactttcaggagagtgaca

SEQ ID NO: 2076 - DNA, 24 bp, Homo sapiens
tacttggtggacctgtacttgtaa

SEQ ID NO: 2077 - DNA, 25 bp, Homo sapiens
ccgtctacttccattagtgcctcta

SEQ ID NO: 2078 - DNA, 23 bp, Homo sapiens
agaacactcagagcgtccagcga

SEQ ID NO: 2079 - DNA, 25 bp, Homo sapiens
cgtgaggcagacatccatagagaca

SEQ ID NO: 2080 - DNA, 25 bp, Homo sapiens
tctataaccatgtccgataccgtga

SEQ ID NO: 2081 - DNA, 25 bp, Homo sapiens
ttactacttccagatccgttgtcgt

SEQ ID NO: 2082 - DNA, 25 bp, Homo sapiens
accagttacaacctccatctaagtc

SEQ ID NO: 2083 - DNA, 25 bp, Homo sapiens
ttagtcgttggttgaactgtagtcg

SEQ ID NO: 2084 - DNA, 25 bp, Homo sapiens
gaacaagaagtttacctcgtcacct

SEQ ID NO: 2085 - DNA, 24 bp, Homo sapiens
aagcaagaacgacgacaacaaggt

SEQ ID NO: 2086 - DNA, 25 bp, Homo sapiens
ttccagaagagtgtcatgttcgtga

SEQ ID NO: 2087 - DNA, 25 bp, Homo sapiens
gaaggttgacttgaagaagggtgct

SEQ ID NO: 2088 - DNA, 25 bp, Homo sapiens
tagaaggactaccaggtcgttgagg

SEQ ID NO: 2089 - DNA, 25 bp, Homo sapiens
ggtcgtgaacgtcattagtgtctta

SEQ ID NO: 2090 - DNA, 25 bp, Homo sapiens
actgaaggtcatcaggcggtactga

SEQ ID NO: 2091 - DNA, 25 bp, Homo sapiens
aggtcgtgaacgtcattagtgtctt

SEQ ID NO: 2092 - DNA, 25 bp, Homo sapiens
ttaggagaaccatacgaaagtcccg

SEQ ID NO: 2093 - DNA, 25 bp, Homo sapiens
agacacaaagacccagtgaaggagg

SEQ ID NO: 2094 - DNA, 25 bp, Homo sapiens
acttggattacttaagacaaagact

SEQ ID NO: 2095 - DNA, 24 bp, Homo sapiens
aattaaagaacggtaagaggtata

SEQ ID NO: 2096 - DNA, 24 bp, Homo sapiens
ggcttccctctcataggcggtaga

SEQ ID NO: 2097 - DNA, 25 bp, Homo sapiens
ttactacctaagtccgtttgggcag

SEQ ID NO: 2098 - DNA, 23 bp, Homo sapiens
gaggccggtgaagaacttgtacg

SEQ ID NO: 2099 - DNA, 24 bp, Homo sapiens
catgaagaacgggaacatcttaaa

SEQ ID NO: 2100 - DNA, 24 bp, Homo sapiens
atgaagaacgggaacatcttaaag

SEQ ID NO: 2101 - DNA, 24 bp, Homo sapiens
acatgaagaacgggaacatcttaa

SEQ ID NO: 2102 - DNA, 25 bp, Homo sapiens
taccaccaaccttacagaagacctt

SEQ ID NO: 2103 - DNA, 23 bp, Homo sapiens
gggctgagggaagtaagaggtac

SEQ ID NO: 2104 - DNA, 24 bp, Homo sapiens
gagggtcaataagttcctctccga

SEQ ID NO: 2105 - DNA, 24 bp, Homo sapiens
agggtcaataagttcctctccgac

SEQ ID NO: 2106 - DNA, 24 bp, Homo sapiens
agagggtcaataagttcctctccg

SEQ ID NO: 2107 - DNA, 24 bp, Homo sapiens
tttcgtcgctggtaggtcagtaaa

SEQ ID NO: 2108 - DNA, 23 bp, Homo sapiens
tagacttctgtccgtgcccgagt

SEQ ID NO: 2109 - DNA, 23 bp, Homo sapiens
aggtggaagggtccttgacacga

SEQ ID NO: 2110 - DNA, 25 bp, Homo sapiens
cgaacagaccttacagttaaacttt

SEQ ID NO: 2111 - DNA, 23 bp, Homo sapiens
tagacttctgtccgtgcccgagt

SEQ ID NO: 2112 - DNA, 23 bp, Homo sapiens
aggtggaagggtccttgacacga

SEQ ID NO: 2113 - DNA, 24 bp, Homo sapiens
gagagagccgaagaccaccacatc

SEQ ID NO: 2114 - DNA, 24 bp, Homo sapiens
gacagtcctgcgtgcgacctaatc

SEQ ID NO: 2115 - DNA, 23 bp, Homo sapiens
cgcaggtccaactgacgagtagg

SEQ ID NO: 2116 - DNA, 23 bp, Homo sapiens
cgtgaccttacggcgtctggaga

SEQ ID NO: 2117 - DNA, 23 bp, Homo sapiens
ttgtccattcggcaggacgaggc

SEQ ID NO: 2118 - DNA, 25 bp, Homo sapiens
gtaaacgaataactctctaaactgt

SEQ ID NO: 2119 - DNA, 25 bp, Homo sapiens
acgttcgtgacgataagaactggtt

SEQ ID NO: 2120 - DNA, 25 bp, Homo sapiens
agacaaccgtcgtttaccatgaagt

SEQ ID NO: 2121 - DNA, 23 bp, Homo sapiens
aggcctgtgagaagtaattatat

SEQ ID NO: 2122 - DNA, 24 bp, Homo sapiens
caagaagtagtagaacctgcagaa

SEQ ID NO: 2123 - DNA, 24 bp, Homo sapiens
aagaagtagtagaacctgcagaag

SEQ ID NO: 2124 - DNA, 24 bp, Homo sapiens
gcaagaagtagtagaacctgcaga

SEQ ID NO: 2125 - DNA, 25 bp, Homo sapiens
gtaaccgaacccactactactttgt

SEQ ID NO: 2126 - DNA, 25 bp, Homo sapiens
cgtctaaaggtctgaacactaacaa

SEQ ID NO: 2127 - DNA, 23 bp, Homo sapiens
gtcgttcaccacttcccaatcgt

SEQ ID NO: 2128 - DNA, 24 bp, Homo sapiens
tacaactcattccacacttctggc

SEQ ID NO: 2129 - DNA, 24 bp, Homo sapiens
tcccgactcctgaccaatttccga

SEQ ID NO: 2130 - DNA, 24 bp, Homo sapiens
tacaactcattccacacttctggc

SEQ ID NO: 2131 - DNA, 24 bp, Homo sapiens
gactcctgaccaatttccgaaacg

SEQ ID NO: 2132 - DNA, 24 bp, Homo sapiens
agtggtagagacacgacagtgaca

SEQ ID NO: 2133 - DNA, 24 bp, Homo sapiens
gaactcgtgtgccaggactgagac

SEQ ID NO: 2134 - DNA, 24 bp, Homo sapiens
cgggttgttgaacgagtttactgg

SEQ ID NO: 2135 - DNA, 24 bp, Homo sapiens
cgtgttactaaaagtggtagagac

SEQ ID NO: 2136 - DNA, 24 bp, Homo sapiens
gaactcgtgtgccaggactgagac

SEQ ID NO: 2137 - DNA, 25 bp, Homo sapiens
gtgacctgacaaaagatcgaaccta

SEQ ID NO: 2138 - DNA, 25 bp, Homo sapiens
actcgtctcagcttcgtcgtcattg

SEQ ID NO: 2139 - DNA, 24 bp, Homo sapiens
gaaataggtctggcgtaaactgga

SEQ ID NO: 2140 - DNA, 24 bp, Homo sapiens
ccacaggtacggaaacagggaaat

SEQ ID NO: 2141 - DNA, 24 bp, Homo sapiens
tcgtaagttcaaccctagtcgtgc

SEQ ID NO: 2142 - DNA, 24 bp, Homo sapiens
ccacaggtacggaaacagggaaat

SEQ ID NO: 2143 - DNA, 24 bp, Homo sapiens
tcgtaagttcaaccctagtcgtgc

SEQ ID NO: 2144 - DNA, 24 bp, Homo sapiens
tctgttgagcaggtggagtagaca

SEQ ID NO: 2145 - DNA, 24 bp, Homo sapiens
gtaccagcccatgatgtatttact

SEQ ID NO: 2146 - DNA, 24 bp, Homo sapiens
taccagcccatgatgtatttactt

SEQ ID NO: 2147 - DNA, 24 bp, Homo sapiens
ggtaccagcccatgatgtatttac

SEQ ID NO: 2148 - DNA, 24 bp, Homo sapiens
tttgttagaaaggacgttgtaaag

SEQ ID NO: 2149 - DNA, 24 bp, Homo sapiens
ttgttagaaaggacgttgtaaaga

SEQ ID NO: 2150 - DNA, 24 bp, Homo sapiens
atttgttagaaaggacgttgtaaa

SEQ ID NO: 2151 - DNA, 25 bp, Homo sapiens
ggtttcggtcccaatataggtgtct

SEQ ID NO: 2152 - DNA, 25 bp, Homo sapiens
taccgaaatcagcatcaacgaagga

SEQ ID NO: 2153 - DNA, 24 bp, Homo sapiens
gctacactctcttcctatcggcgg

SEQ ID NO: 2154 - DNA, 24 bp, Homo sapiens
ttcttcacaatgtcgtcccgaggg

SEQ ID NO: 2155 - DNA, 25 bp, Homo sapiens
ggtttcggtcccaatataggtgtct

SEQ ID NO: 2156 - DNA, 23 bp, Homo sapiens
ccgaaatcagcatcaacgaagga

SEQ ID NO: 2157 - DNA, 24 bp, Homo sapiens
acgggttgagtggtgtctagttgt

SEQ ID NO: 2158 - DNA, 24 bp, Homo sapiens
cgggttgagtggtgtctagttgtc

SEQ ID NO: 2159 - DNA, 24 bp, Homo sapiens
aacgggttgagtggtgtctagttg

SEQ ID NO: 2160 - DNA, 23 bp, Homo sapiens
ctcctggtccagtccctaccatg

SEQ ID NO: 2161 - DNA, 24 bp, Homo sapiens
tgtctagttgtcgttgtcggagcc

SEQ ID NO: 2162 - DNA, 24 bp, Homo sapiens
gacgacgatgactaaggacgaggc

SEQ ID NO: 2163 - DNA, 25 bp, Homo sapiens
ggagtcggaccttatctacagattc

SEQ ID NO: 2164 - DNA, 25 bp, Homo sapiens
gcggttgaagtgaagtgtcatctac

SEQ ID NO: 2165 - DNA, 24 bp, Homo sapiens
tgaactggtgaactgacttgagga

SEQ ID NO: 2166 - DNA, 24 bp, Homo sapiens
gtatgtgaagtcgtaggaggaggt

SEQ ID NO: 2167 - DNA, 24 bp, Homo sapiens
aacctcctgtttcacaaagccagt

SEQ ID NO: 2168 - DNA, 24 bp, Homo sapiens
tgaactggtgaactgacttgagga

SEQ ID NO: 2169 - DNA, 24 bp, Homo sapiens
gtatgtgaagtcgtaggaggaggt

SEQ ID NO: 2170 - DNA, 24 bp, Homo sapiens
agagaactacatgaagaagcctga

SEQ ID NO: 2171 - DNA, 25 bp, Homo sapiens
agtgtaaaataaaggaactcgtaga

SEQ ID NO: 2172 - DNA, 25 bp, Homo sapiens
tagactttagtcaaaccgacctata

SEQ ID NO: 2173 - DNA, 25 bp, Homo sapiens
acacaacaactgttaaataggcagg

SEQ ID NO: 2174 - DNA, 24 bp, Homo sapiens
tgtccctgagtggtagagccgacg

SEQ ID NO: 2175 - DNA, 24 bp, Homo sapiens
gtccctgagtggtagagccgacgg

SEQ ID NO: 2176 - DNA, 24 bp, Homo sapiens
atgtccctgagtggtagagccgac

SEQ ID NO: 2177 - DNA, 23 bp, Homo sapiens
tttcaccgtgctactctgtgtgt

SEQ ID NO: 2178 - DNA, 25 bp, Homo sapiens
tgactgactcctgtattaccaccga

SEQ ID NO: 2179 - DNA, 25 bp, Homo sapiens
aacgacgtgtcaggaagtgtcatca

SEQ ID NO: 2180 - DNA, 25 bp, Homo sapiens
ggtgaccaagttacgaatctcataa

SEQ ID NO: 2181 - DNA, 24 bp, Homo sapiens
acgtcttcgaaagtgtttggccta

SEQ ID NO: 2182 - DNA, 24 bp, Homo sapiens
acgattcggtcggagtctaaaaag

SEQ ID NO: 2183 - DNA, 24 bp, Homo sapiens
cgattcggtcggagtctaaaaagg

SEQ ID NO: 2184 - DNA, 24 bp, Homo sapiens
gacgattcggtcggagtctaaaaa

SEQ ID NO: 2185 - DNA, 24 bp, Homo sapiens
gagtaaagtcccgacgttttattc

SEQ ID NO: 2186 - DNA, 24 bp, Homo sapiens
agtaaagtcccgacgttttattct

SEQ ID NO: 2187 - DNA, 24 bp, Homo sapiens
agagtaaagtcccgacgttttatt

SEQ ID NO: 2188 - DNA, 24 bp, Homo sapiens
cttgtggtagtggacgtaggaagt

SEQ ID NO: 2189 - DNA, 24 bp, Homo sapiens
ttgtggtagtggacgtaggaagtt

SEQ ID NO: 2190 - DNA, 24 bp, Homo sapiens
gcttgtggtagtggacgtaggaag

SEQ ID NO: 2191 - DNA, 25 bp, Homo sapiens
ctgtggtcgtagttcatcgtaagca

SEQ ID NO: 2192 - DNA, 24 bp, Homo sapiens
gaatgtgtggtggacatgatacac

SEQ ID NO: 2193 - DNA, 24 bp, Homo sapiens
aatgtgtggtggacatgatacaca

SEQ ID NO: 2194 - DNA, 24 bp, Homo sapiens
agaatgtgtggtggacatgataca

SEQ ID NO: 2195 - DNA, 24 bp, Homo sapiens
tctgtggaagtagaagtcgtgacc

SEQ ID NO: 2196 - DNA, 24 bp, Homo sapiens
cgcatccgtaacgagttcatggct

SEQ ID NO: 2197 - DNA, 24 bp, Homo sapiens
cctcacacaggtaacccatcgtta

SEQ ID NO: 2198 - DNA, 24 bp, Homo sapiens
actcacagagtagcaggacctgtt

SEQ ID NO: 2199 - DNA, 24 bp, Homo sapiens
ctcacagagtagcaggacctgttt

SEQ ID NO: 2200 - DNA, 24 bp, Homo sapiens
aactcacagagtagcaggacctgt

SEQ ID NO: 2201 - DNA, 23 bp, Homo sapiens
cgcagcgcgtggttgttgtttta

SEQ ID NO: 2202 - DNA, 24 bp, Homo sapiens
attgcgttagtgcccttagtgcgt

SEQ ID NO: 2203 - DNA, 23 bp, Homo sapiens
cgtagtcgtacctctcgtagtga

SEQ ID NO: 2204 - DNA, 23 bp, Homo sapiens
aagcgtctacggaccttttgaag

SEQ ID NO: 2205 - DNA, 23 bp, Homo sapiens
gtaaaacaagattctctcaactg

SEQ ID NO: 2206 - DNA, 23 bp, Homo sapiens
agtaagccaatattccgtgtcgg

SEQ ID NO: 2207 - DNA, 25 bp, Homo sapiens
ggtgagggtcataaagggtgttagt

SEQ ID NO: 2208 - DNA, 25 bp, Homo sapiens
cggtcagaaagtgtagatacggttg

SEQ ID NO: 2209 - DNA, 24 bp, Homo sapiens
gttccatgttacgagcgacgcagt

SEQ ID NO: 2210 - DNA, 25 bp, Homo sapiens
gttccgaagtaccgtagttgaagtc

SEQ ID NO: 2211 - DNA, 24 bp, Homo sapiens
ggtttacacacggttgctcttagt

SEQ ID NO: 2212 - DNA, 25 bp, Homo sapiens
aacctccaacctatgaaggacgagt

SEQ ID NO: 2213 - DNA, 24 bp, Homo sapiens
aactcactcgtggagaagtaataa

SEQ ID NO: 2214 - DNA, 23 bp, Homo sapiens
aagaagatccgaagagaaggtct

SEQ ID NO: 2215 - DNA, 24 bp, Homo sapiens
cgacggtgactggtgtctgaacca

SEQ ID NO: 2216 - DNA, 24 bp, Homo sapiens
gacggtgactggtgtctgaaccag

SEQ ID NO: 2217 - DNA, 24 bp, Homo sapiens
acgacggtgactggtgtctgaacc

SEQ ID NO: 2218 - DNA, 24 bp, Homo sapiens
ctactctttgacagacaggttgcc

SEQ ID NO: 2219 - DNA, 24 bp, Homo sapiens
cggtaggaatcaaggtgcgttctt

SEQ ID NO: 2220 - DNA, 24 bp, Homo sapiens
gtaatagacaactgacggactctt

SEQ ID NO: 2221 - DNA, 24 bp, Homo sapiens
cggtaggaatcaaggtgcgttctt

SEQ ID NO: 2222 - DNA, 24 bp, Homo sapiens
gtaatagacaactgacggactctt

SEQ ID NO: 2223 - DNA, 24 bp, Homo sapiens
cccactgtctcgctctgaggtaga

SEQ ID NO: 2224 - DNA, 25 bp, Homo sapiens
gcttcgttgtgaaagtagtgggagt

SEQ ID NO: 2225 - DNA, 25 bp, Homo sapiens
tagtacatggtgaagacgaagtaga

SEQ ID NO: 2226 - DNA, 25 bp, Homo sapiens
aaagagggagggagggacaggtttc

SEQ ID NO: 2227 - DNA, 24 bp, Homo sapiens
acaagagttttggagtaccgtccg

SEQ ID NO: 2228 - DNA, 24 bp, Homo sapiens
caagagttttggagtaccgtccga

SEQ ID NO: 2229 - DNA, 24 bp, Homo sapiens
gacaagagttttggagtaccgtcc

SEQ ID NO: 2230 - DNA, 24 bp, Homo sapiens
aacacagcactgggagtttgtact

SEQ ID NO: 2231 - DNA, 24 bp, Homo sapiens
acacagcactgggagtttgtactt

SEQ ID NO: 2232 - DNA, 24 bp, Homo sapiens
caacacagcactgggagtttgtac

SEQ ID NO: 2233 - DNA, 24 bp, Homo sapiens
ctaccggctggtagtttacgtacg

SEQ ID NO: 2234 - DNA, 24 bp, Homo sapiens
atgggtcgagaatgaggaaggtac

SEQ ID NO: 2235 - DNA, 25 bp, Homo sapiens
ccgattaacacgaaggttgtaggtt

SEQ ID NO: 2236 - DNA, 24 bp, Homo sapiens
cgacccgtgatggacataagaagt

SEQ ID NO: 2237 - DNA, 24 bp, Homo sapiens
cggtcgtcataaactgtgtcgtcg

SEQ ID NO: 2238 - DNA, 23 bp, Homo sapiens
gacacgagacgcccaggacggag

SEQ ID NO: 2239 - DNA, 25 bp, Homo sapiens
cgctgaggcttagatcaagatgacg

SEQ ID NO: 2240 - DNA, 25 bp, Homo sapiens
cactgagtattgactttggacaacg

SEQ ID NO: 2241 - DNA, 25 bp, Homo sapiens
acctttaaaaaagagactctaatgt

SEQ ID NO: 2242 - DNA, 25 bp, Homo sapiens
aagaaatacaaaaggcgagacaggt

SEQ ID NO: 2243 - DNA, 24 bp, Homo sapiens
cggaccccccgggagcagtgggaa

SEQ ID NO: 2244 - DNA, 24 bp, Homo sapiens
ggaccccccgggagcagtgggaag

SEQ ID NO: 2245 - DNA, 24 bp, Homo sapiens
acggaccccccgggagcagtggga

SEQ ID NO: 2246 - DNA, 25 bp, Homo sapiens
tgacttttgaactcgacatggtctt

SEQ ID NO: 2247 - DNA, 25 bp, Homo sapiens
acgaagtgacgatgacgctaactac

SEQ ID NO: 2248 - DNA, 25 bp, Homo sapiens
tggtcctcgtctggtaaatgaactt

SEQ ID NO: 2249 - DNA, 24 bp, Homo sapiens
gtgacatgaccggtaccgaggccg

SEQ ID NO: 2250 - DNA, 24 bp, Homo sapiens
tgacatgaccggtaccgaggccga

SEQ ID NO: 2251 - DNA, 24 bp, Homo sapiens
ggtgacatgaccggtaccgaggcc

SEQ ID NO: 2252 - DNA, 24 bp, Homo sapiens
tttgcattgccggacgtttaggac

SEQ ID NO: 2253 - DNA, 24 bp, Homo sapiens
ttgcattgccggacgtttaggacg

SEQ ID NO: 2254 - DNA, 24 bp, Homo sapiens
ttttgcattgccggacgtttagga

SEQ ID NO: 2255 - DNA, 23 bp, Homo sapiens
tcgtcgttaccagtcaggttgac

SEQ ID NO: 2256 - DNA, 23 bp, Homo sapiens
cgtcgtcgttaccagtcaggttg

SEQ ID NO: 2257 - DNA, 24 bp, Homo sapiens
tgaactccgaggtatacgaagtac

SEQ ID NO: 2258 - DNA, 25 bp, Homo sapiens
ggtggagatattatcggtggtgact

SEQ ID NO: 2259 - DNA, 24 bp, Homo sapiens
tgaactccgaggtatacgaagtac

SEQ ID NO: 2260 - DNA, 24 bp, Homo sapiens
cgtcgtcgttaccagtcaggttga

SEQ ID NO: 2261 - DNA, 24 bp, Homo sapiens
tgaactccgaggtatacgaagtac

SEQ ID NO: 2262 - DNA, 25 bp, Homo sapiens
ggtggagatattatcggtggtgact

SEQ ID NO: 2263 - DNA, 23 bp, Homo sapiens
aagtccctcccgttacagtccga

SEQ ID NO: 2264 - DNA, 24 bp, Homo sapiens
ggaccgaactcgttaccttctagt

SEQ ID NO: 2265 - DNA, 23 bp, Homo sapiens
ccttgacctcgtccgacacctcc

SEQ ID NO: 2266 - DNA, 24 bp, Homo sapiens
agtgacacgttggaaagtaaaagg

SEQ ID NO: 2267 - DNA, 24 bp, Homo sapiens
gtgacacgttggaaagtaaaagga

SEQ ID NO: 2268 - DNA, 24 bp, Homo sapiens
aagtgacacgttggaaagtaaaag

SEQ ID NO: 2269 - DNA, 25 bp, Homo sapiens
cgaaagtggtggaaatggaaggaga

SEQ ID NO: 2270 - DNA, 24 bp, Homo sapiens
acacagcagaggaagaggaaccgt

SEQ ID NO: 2271 - DNA, 25 bp, Homo sapiens
taaagtagagtgggtggacaaagac

SEQ ID NO: 2272 - DNA, 25 bp, Homo sapiens
aggaattactgagcaagttaaaccg

SEQ ID NO: 2273 - DNA, 25 bp, Homo sapiens
accgtatgatcttacaagtcagtca

SEQ ID NO: 2274 - DNA, 25 bp, Homo sapiens
tctacaacacttgaccgtacactct

SEQ ID NO: 2275 - DNA, 25 bp, Homo sapiens
cgaaggacaacgtgactgttctatt

SEQ ID NO: 2276 - DNA, 24 bp, Homo sapiens
tgaccctctcgagacacgttttgt

SEQ ID NO: 2277 - DNA, 24 bp, Homo sapiens
gaccctctcgagacacgttttgtt

SEQ ID NO: 2278 - DNA, 24 bp, Homo sapiens
ttgaccctctcgagacacgttttg

SEQ ID NO: 2279 - DNA, 23 bp, Homo sapiens
cgtgatgccttgcggtctgaaag

SEQ ID NO: 2280 - DNA, 25 bp, Homo sapiens
cgagaaagatggtgtagaaaggtga

SEQ ID NO: 2281 - DNA, 25 bp, Homo sapiens
gaacttgtggtcctggtatgagaag

SEQ ID NO: 2282 - DNA, 25 bp, Homo sapiens
gaacttgtggtcctggtatgagaag

SEQ ID NO: 2283 - DNA, 24 bp, Homo sapiens
cctaccgtcgtcaccactacattg

SEQ ID NO: 2284 - DNA, 24 bp, Homo sapiens
cgtggttctcgtctttgtccttgc

SEQ ID NO: 2285 - DNA, 24 bp, Homo sapiens
cggtgttgacttgtggtggttgct

SEQ ID NO: 2286 - DNA, 24 bp, Homo sapiens
ttctcggtcgtctaaggcgtcgta

SEQ ID NO: 2287 - DNA, 24 bp, Homo sapiens
tcacgaatagcaggagacgggtta

SEQ ID NO: 2288 - DNA, 24 bp, Homo sapiens
ccttcgtcacgaatagcaggagac

SEQ ID NO: 2289 - DNA, 24 bp, Homo sapiens
ggccttgaaataaaaattttacgg

SEQ ID NO: 2290 - DNA, 24 bp, Homo sapiens
tgttgacttgtggtggttgctttt

SEQ ID NO: 2291 - DNA, 24 bp, Homo sapiens
gaaccgacaatgactggtcgttgg

SEQ ID NO: 2292 - DNA, 24 bp, Homo sapiens
cttacgaagcttgaacctctgcta

SEQ ID NO: 2293 - DNA, 24 bp, Homo sapiens
ttacgaagcttgaacctctgctaa

SEQ ID NO: 2294 - DNA, 24 bp, Homo sapiens
acttacgaagcttgaacctctgct

SEQ ID NO: 2295 - DNA, 24 bp, Homo sapiens
aaccacggttaagcgaagtccatg

SEQ ID NO: 2296 - DNA, 24 bp, Homo sapiens
acttcgatcttgacgccgttatgt

SEQ ID NO: 2297 - DNA, 24 bp, Homo sapiens
gcgaaaactggttccctttgtagc

SEQ ID NO: 2298 - DNA, 24 bp, Homo sapiens
tcgatcttgacgccgttatgtcga

SEQ ID NO: 2299 - DNA, 24 bp, Homo sapiens
actggttccctttgtagcacttcc

SEQ ID NO: 2300 - DNA, 24 bp, Homo sapiens
aagaccaccgagacggaacggtaa

SEQ ID NO: 2301 - DNA, 24 bp, Homo sapiens
ggcataaacagtacttttagtcca

SEQ ID NO: 2302 - DNA, 24 bp, Homo sapiens
tgtctttcaccgaggtgatcgatt

SEQ ID NO: 2303 - DNA, 23 bp, Homo sapiens
atgcgtccaccataattcgtcgg

SEQ ID NO: 2304 - DNA, 25 bp, Homo sapiens
tattcgtgtcaagacccaaccgtca

SEQ ID NO: 2305 - DNA, 23 bp, Homo sapiens
aggtgcttcgtgtttgctccaga

SEQ ID NO: 2306 - DNA, 25 bp, Homo sapiens
tcgtagggtcttgaattgactgggt

SEQ ID NO: 2307 - DNA, 25 bp, Homo sapiens
tgtggtcctctactagacttaccgt

SEQ ID NO: 2308 - DNA, 25 bp, Homo sapiens
agacactaatgaaggacgaacgact

SEQ ID NO: 2309 - DNA, 24 bp, Homo sapiens
tttaccgtttaagaagggtcccgg

SEQ ID NO: 2310 - DNA, 24 bp, Homo sapiens
ttaccgtttaagaagggtcccggg

SEQ ID NO: 2311 - DNA, 24 bp, Homo sapiens
ttttaccgtttaagaagggtcccg

SEQ ID NO: 2312 - DNA, 24 bp, Homo sapiens
cgaggatgcctggtgtctccaaca

SEQ ID NO: 2313 - DNA, 24 bp, Homo sapiens
ccgggttgtatggcgacgaccttc

SEQ ID NO: 2314 - DNA, 24 bp, Homo sapiens
cgggttgtatggcgacgaccttcg

SEQ ID NO: 2315 - DNA, 24 bp, Homo sapiens
accgggttgtatggcgacgacctt

SEQ ID NO: 2316 - DNA, 24 bp, Homo sapiens
tttaccgtttaagcgacgaccttc

SEQ ID NO: 2317 - DNA, 24 bp, Homo sapiens
ttaccgtttaagcgacgaccttcg

SEQ ID NO: 2318 - DNA, 24 bp, Homo sapiens
ttttaccgtttaagcgacgacctt

SEQ ID NO: 2319 - DNA, 24 bp, Homo sapiens
tggttctggaaaaaaaagtgctgg

SEQ ID NO: 2320 - DNA, 24 bp, Homo sapiens
actcctgtctactttaccgccgtg

SEQ ID NO: 2321 - DNA, 24 bp, Homo sapiens
gcgtctcttactcctgtctacttt

SEQ ID NO: 2322 - DNA, 24 bp, Homo sapiens
ttgtatggcgacgaccttcgagac

SEQ ID NO: 2323 - DNA, 24 bp, Homo sapiens
cgaggatgcctggtgtctccaaca

SEQ ID NO: 2324 - DNA, 24 bp, Homo sapiens
gacgaccttcgagacgctttccgc

SEQ ID NO: 2325 - DNA, 24 bp, Homo sapiens
cttggaggcctacgagaccgggtt

SEQ ID NO: 2326 - DNA, 24 bp, Homo sapiens
tatcaccgaggatgcctggtgtct

SEQ ID NO: 2327 - DNA, 25 bp, Homo sapiens
caactccgtttcagtctttgacaag

SEQ ID NO: 2328 - DNA, 25 bp, Homo sapiens
cgagagtgattcaagtacgacggaa

SEQ ID NO: 2329 - DNA, 25 bp, Homo sapiens
gtctaagaaggagtcgaagtacacg

SEQ ID NO: 2330 - DNA, 24 bp, Homo sapiens
gacgtcgttatggtgtttcctgtc

SEQ ID NO: 2331 - DNA, 24 bp, Homo sapiens
acgtcgttatggtgtttcctgtcc

SEQ ID NO: 2332 - DNA, 24 bp, Homo sapiens
ggacgtcgttatggtgtttcctgt

SEQ ID NO: 2333 - DNA, 25 bp, Homo sapiens
gaagtgtgaggtctcaatgttgtcg

SEQ ID NO: 2334 - DNA, 23 bp, Homo sapiens
ctaggctaaccgtgaccgagacc

SEQ ID NO: 2335 - DNA, 25 bp, Homo sapiens
tgtttcctgtcctcgttcacttgcc

SEQ ID NO: 2336 - DNA, 24 bp, Homo sapiens
aggtttcgacagttagaccgtgga

SEQ ID NO: 2337 - DNA, 24 bp, Homo sapiens
tctttcccaaacagtagtgagtat

SEQ ID NO: 2338 - DNA, 24 bp, Homo sapiens
aagaagttcgtcaacagcgtgtgt

SEQ ID NO: 2339 - DNA, 24 bp, Homo sapiens
tgagccagaaggttcaccaaaggg

SEQ ID NO: 2340 - DNA, 24 bp, Homo sapiens
cgaactggaggtggcagaacagac

SEQ ID NO: 2341 - DNA, 24 bp, Homo sapiens
tgagccagaaggttcaccaaaggg

SEQ ID NO: 2342 - DNA, 24 bp, Homo sapiens
cgaactggaggtggcagaacagac

SEQ ID NO: 2343 - DNA, 24 bp, Homo sapiens
ttcgtctgtaggtgcggcagttaa

SEQ ID NO: 2344 - DNA, 24 bp, Homo sapiens
tgagccagaaggttcaccaaaggg

SEQ ID NO: 2345 - DNA, 24 bp, Homo sapiens
tggtgagcctgtttttggaggggc

SEQ ID NO: 2346 - DNA, 24 bp, Homo sapiens
aactggaggtggcagaacagactc

SEQ ID NO: 2347 - DNA, 24 bp, Homo sapiens
aagaagttcgtcaacagcgtgtgt

SEQ ID NO: 2348 - DNA, 24 bp, Homo sapiens
tgagccagaaggttcaccaaaggg

SEQ ID NO: 2349 - DNA, 24 bp, Homo sapiens
actggaggtggcagaacagactcg

SEQ ID NO: 2350 - DNA, 23 bp, Homo sapiens
gtttcatgcaggtccgatgtctc

SEQ ID NO: 2351 - DNA, 23 bp, Homo sapiens
acgtgcatgtcgtagcacccctc

SEQ ID NO: 2352 - DNA, 24 bp, Homo sapiens
ggactacatgcctaacggatcatt

SEQ ID NO: 2353 - DNA, 24 bp, Homo sapiens
gaccctaaaatggacgtctccgtt

SEQ ID NO: 2354 - DNA, 24 bp, Homo sapiens
accctaaaatggacgtctccgttc

SEQ ID NO: 2355 - DNA, 24 bp, Homo sapiens
agaccctaaaatggacgtctccgt

SEQ ID NO: 2356 - DNA, 25 bp, Homo sapiens
agactattcctgacgttgaaagtgt

SEQ ID NO: 2357 - DNA, 24 bp, Homo sapiens
caagcacaaccgacgtagtagact

SEQ ID NO: 2358 - DNA, 23 bp, Homo sapiens
ctgcgaaagggtcctgccacaaa

SEQ ID NO: 2359 - DNA, 25 bp, Homo sapiens
cagtcaatacccaggcagtgtcagt

SEQ ID NO: 2360 - DNA, 25 bp, Homo sapiens
tccgtgagcgagtacctgatattgg

SEQ ID NO: 2361 - DNA, 25 bp, Homo sapiens
tgtcttagtacggtgtatgaaggca

SEQ ID NO: 2362 - DNA, 24 bp, Homo sapiens
gaaacaagagtggagtaccgaacc

SEQ ID NO: 2363 - DNA, 24 bp, Homo sapiens
aaacaagagtggagtaccgaaccg

SEQ ID NO: 2364 - DNA, 24 bp, Homo sapiens
agaaacaagagtggagtaccgaac

SEQ ID NO: 2365 - DNA, 25 bp, Homo sapiens
ccacaaggacagtctgcgtattaga

SEQ ID NO: 2366 - DNA, 25 bp, Homo sapiens
ccacaaggacagtctgcgtattaga

SEQ ID NO: 2367 - DNA, 25 bp, Homo sapiens
accgaaccgtaggacaattactcta

SEQ ID NO: 2368 - DNA, 25 bp, Homo sapiens
tcaagtagaagccgtagactcagtt

SEQ ID NO: 2369 - DNA, 24 bp, Homo sapiens
ggagcttaggcgtggtcgagacgt

SEQ ID NO: 2370 - DNA, 24 bp, Homo sapiens
gaccgactcgtgtgctagacccgt

SEQ ID NO: 2371 - DNA, 24 bp, Homo sapiens
tccttctgtagtttcaattgtagt

SEQ ID NO: 2372 - DNA, 24 bp, Homo sapiens
tctaacgactaagactttttatgt

SEQ ID NO: 2373 - DNA, 24 bp, Homo sapiens
ctaacgactaagactttttatgtg

SEQ ID NO: 2374 - DNA, 24 bp, Homo sapiens
atctaacgactaagactttttatg

SEQ ID NO: 2375 - DNA, 24 bp, Homo sapiens
tactttagtactgaaggtagagcc

SEQ ID NO: 2376 - DNA, 24 bp, Homo sapiens
actttagtactgaaggtagagcca

SEQ ID NO: 2377 - DNA, 24 bp, Homo sapiens
ttactttagtactgaaggtagagc

SEQ ID NO: 2378 - DNA, 25 bp, Homo sapiens
acactttaactaaacgcagggaggg

SEQ ID NO: 2379 - DNA, 24 bp, Homo sapiens
acatcacctcccttcacccgactc

SEQ ID NO: 2380 - DNA, 25 bp, Homo sapiens
tgaggacattattcggaggtactgg

SEQ ID NO: 2381 - DNA, 24 bp, Homo sapiens
gtgagtaagctggactttttttgt

SEQ ID NO: 2382 - DNA, 24 bp, Homo sapiens
tgagtaagctggactttttttgtc

SEQ ID NO: 2383 - DNA, 24 bp, Homo sapiens
agtgagtaagctggactttttttg

SEQ ID NO: 2384 - DNA, 24 bp, Homo sapiens
tggacctcaacgacatttcagaag

SEQ ID NO: 2385 - DNA, 24 bp, Homo sapiens
tacccgacgatacagaagtagtca

SEQ ID NO: 2386 - DNA, 24 bp, Homo sapiens
cggaagtcacgaacactatccacc

SEQ ID NO: 2387 - DNA, 25 bp, Homo sapiens
ccgttatatagcctcaggtgttcgc

SEQ ID NO: 2388 - DNA, 25 bp, Homo sapiens
agtctcagccaagtcgtcaagaaga

SEQ ID NO: 2389 - DNA, 23 bp, Homo sapiens
agcacgggacctactggagttca

SEQ ID NO: 2390 - DNA, 25 bp, Homo sapiens
acaactcgcctaacatctctttccg

SEQ ID NO: 2391 - DNA, 25 bp, Homo sapiens
agtcaccacatccagagtcctccac

SEQ ID NO: 2392 - DNA, 25 bp, Homo sapiens
gaatcgtaagacacctcgtagtagt

SEQ ID NO: 2393 - DNA, 24 bp, Homo sapiens
ggaggaggagtaggcgtctaggtt

SEQ ID NO: 2394 - DNA, 25 bp, Homo sapiens
tctgaaaaggaggaggagcgaaacg

SEQ ID NO: 2395 - DNA, 25 bp, Homo sapiens
acagaagggtcgtggatttatgggc

SEQ ID NO: 2396 - DNA, 24 bp, Homo sapiens
tcgacaaaaccgctcgtaaggagt

SEQ ID NO: 2397 - DNA, 24 bp, Homo sapiens
cgacaaaaccgctcgtaaggagtt

SEQ ID NO: 2398 - DNA, 24 bp, Homo sapiens
ttcgacaaaaccgctcgtaaggag

SEQ ID NO: 2399 - DNA, 25 bp, Homo sapiens
cgactgtaagaagatcctggtgata

SEQ ID NO: 2400 - DNA, 25 bp, Homo sapiens
tcatttcatcccgacgaaccactgt

SEQ ID NO: 2401 - DNA, 25 bp, Homo sapiens
accgatgtcctaaaccttctctccc

SEQ ID NO: 2402 - DNA, 23 bp, Homo sapiens
tcgaccccagtaccgctaaggac

SEQ ID NO: 2403 - DNA, 24 bp, Homo sapiens
cgactatgggaaacgacaacggag

SEQ ID NO: 2404 - DNA, 25 bp, Homo sapiens
acatctcgtagaacagtctgaggta

SEQ ID NO: 2405 - DNA, 24 bp, Homo sapiens
cgacggttgagcacgagacagatg

SEQ ID NO: 2406 - DNA, 25 bp, Homo sapiens
ccagactttagactcgaacttcggt

SEQ ID NO: 2407 - DNA, 25 bp, Homo sapiens
ggacacttacagacaatcaacaacc

SEQ ID NO: 2408 - DNA, 24 bp, Homo sapiens
ttaggtacgcaatgacgacatccg

SEQ ID NO: 2409 - DNA, 24 bp, Homo sapiens
tcggtgtttcctgttacggtttcg

SEQ ID NO: 2410 - DNA, 25 bp, Homo sapiens
tcgaccttcacgtttagacctctgt

SEQ ID NO: 2411 - DNA, 23 bp, Homo sapiens
tttcagagtaggtttcggttccg

SEQ ID NO: 2412 - DNA, 25 bp, Homo sapiens
cttcaaagacgtttcgtaggagacg

SEQ ID NO: 2413 - DNA, 25 bp, Homo sapiens
acaaaagacgaaaagaaggaaaagt

SEQ ID NO: 2414 - DNA, 25 bp, Homo sapiens
aaaagagttacgtcttcgttttagt

SEQ ID NO: 2415 - DNA, 24 bp, Homo sapiens
acccacaagaaggacacactcttg

SEQ ID NO: 2416 - DNA, 24 bp, Homo sapiens
cccacaagaaggacacactcttgt

SEQ ID NO: 2417 - DNA, 24 bp, Homo sapiens
aacccacaagaaggacacactctt

SEQ ID NO: 2418 - DNA, 24 bp, Homo sapiens
actaggtcctgtcctgtttgaagg

SEQ ID NO: 2419 - DNA, 25 bp, Homo sapiens
aagaggtcagaaccgatgtactgtt

SEQ ID NO: 2420 - DNA, 23 bp, Homo sapiens
gctgtaatcccaaccctcctgga

SEQ ID NO: 2421 - DNA, 24 bp, Homo sapiens
actaggtcctgtcctgtttgaagg

SEQ ID NO: 2422 - DNA, 25 bp, Homo sapiens
aagaggtcagaaccgatgtactgtt

SEQ ID NO: 2423 - DNA, 24 bp, Homo sapiens
cgtctcctcgtgtggttctcgtgt

SEQ ID NO: 2424 - DNA, 24 bp, Homo sapiens
ggtcccatcctagaaatacgttga

SEQ ID NO: 2425 - DNA, 24 bp, Homo sapiens
tccaaaagaaggtctctacggtca

SEQ ID NO: 2426 - DNA, 24 bp, Homo sapiens
cacgctacgacagacagtttgttg

SEQ ID NO: 2427 - DNA, 24 bp, Homo sapiens
acgctacgacagacagtttgttgt

SEQ ID NO: 2428 - DNA, 24 bp, Homo sapiens
acacgctacgacagacagtttgtt

SEQ ID NO: 2429 - DNA, 24 bp, Homo sapiens
cttttaccgtctgtatcgctccgg

SEQ ID NO: 2430 - DNA, 24 bp, Homo sapiens
ttttaccgtctgtatcgctccggc

SEQ ID NO: 2431 - DNA, 24 bp, Homo sapiens
acttttaccgtctgtatcgctccg

SEQ ID NO: 2432 - DNA, 25 bp, Homo sapiens
ctgctagtcgaactcaatctagtgt

SEQ ID NO: 2433 - DNA, 25 bp, Homo sapiens
acagaggagttgatgctttagtatc

SEQ ID NO: 2434 - DNA, 25 bp, Homo sapiens
ggttcagatgtttctctagcgacag

SEQ ID NO: 2435 - DNA, 25 bp, Homo sapiens
aagtaggagtgtcacaagagcggtc

SEQ ID NO: 2436 - DNA, 25 bp, Homo sapiens
tgatgttgtggtaagttatgctgga

SEQ ID NO: 2437 - DNA, 24 bp, Homo sapiens
tccgacctcaccagaatcaccgtt

SEQ ID NO: 2438 - DNA, 24 bp, Homo sapiens
gacggactaatcgacattgttttc

SEQ ID NO: 2439 - DNA, 24 bp, Homo sapiens
acggactaatcgacattgttttct

SEQ ID NO: 2440 - DNA, 24 bp, Homo sapiens
cgacggactaatcgacattgtttt

SEQ ID NO: 2441 - DNA, 24 bp, Homo sapiens
cctaccaccaggaacaggtcactg

SEQ ID NO: 2442 - DNA, 25 bp, Homo sapiens
tcgtagtaagttgtagcactcgtgt

SEQ ID NO: 2443 - DNA, 25 bp, Homo sapiens
gtttacctttaccctgtacctgtca

SEQ ID NO: 2444 - DNA, 24 bp, Homo sapiens
tcttagcatgtcgaggtgaaggtc

SEQ ID NO: 2445 - DNA, 24 bp, Homo sapiens
cttagcatgtcgaggtgaaggtca

SEQ ID NO: 2446 - DNA, 24 bp, Homo sapiens
gtcttagcatgtcgaggtgaaggt

SEQ ID NO: 2447 - DNA, 24 bp, Homo sapiens
ccaacagacagtgtagtgcccgtt

SEQ ID NO: 2448 - DNA, 24 bp, Homo sapiens
cggaagaggaggtgtgtgcattgg

SEQ ID NO: 2449 - DNA, 24 bp, Homo sapiens
ttctagttgttgattaccaagtcg

SEQ ID NO: 2450 - DNA, 24 bp, Homo sapiens
ataatgtgtgtggagttgacagtt

SEQ ID NO: 2451 - DNA, 24 bp, Homo sapiens
taatgtgtgtggagttgacagttt

SEQ ID NO: 2452 - DNA, 24 bp, Homo sapiens
aataatgtgtgtggagttgacagt

SEQ ID NO: 2453 - DNA, 25 bp, Homo sapiens
tataaatcggtagagcggtaggagc

SEQ ID NO: 2454 - DNA, 24 bp, Homo sapiens
ttgtcacggtccgaatccacagac

SEQ ID NO: 2455 - DNA, 25 bp, Homo sapiens
cgtcctttgtagtaactctgtgtgg

SEQ ID NO: 2456 - DNA, 23 bp, Homo sapiens
cagaaccgtccaccgtgtcttcc

SEQ ID NO: 2457 - DNA, 25 bp, Homo sapiens
tgaaggcaacgaacctggagaagtc

SEQ ID NO: 2458 - DNA, 23 bp, Homo sapiens
tcggtagagcggtaggagcttct

SEQ ID NO: 2459 - DNA, 24 bp, Homo sapiens
tagggtgaaccggaacgggcactt

SEQ ID NO: 2460 - DNA, 24 bp, Homo sapiens
gaattccacggattggaggagacg

SEQ ID NO: 2461 - DNA, 24 bp, Homo sapiens
tgtcgtagaggagtaggctaccga

SEQ ID NO: 2462 - DNA, 24 bp, Homo sapiens
gtcaacgaacaaacatcaccggta

SEQ ID NO: 2463 - DNA, 24 bp, Homo sapiens
aggctactgcacgatccgtactca

SEQ ID NO: 2464 - DNA, 24 bp, Homo sapiens
ggctactgcacgatccgtactcat

SEQ ID NO: 2465 - DNA, 24 bp, Homo sapiens
aaggctactgcacgatccgtactc

SEQ ID NO: 2466 - DNA, 24 bp, Homo sapiens
tcggtgactcaggtaaaaggccgg

SEQ ID NO: 2467 - DNA, 24 bp, Homo sapiens
cggtgactcaggtaaaaggccgga

SEQ ID NO: 2468 - DNA, 24 bp, Homo sapiens
ttcggtgactcaggtaaaaggccg

SEQ ID NO: 2469 - DNA, 25 bp, Homo sapiens
cgtgtaactgatggaagaaatggaa

SEQ ID NO: 2470 - DNA, 25 bp, Homo sapiens
aagcagtgtgactctaaccctgact

SEQ ID NO: 2471 - DNA, 23 bp, Homo sapiens
tgagtataccaaaatgaggccgt

SEQ ID NO: 2472 - DNA, 24 bp, Homo sapiens
taggtcgtttcgggtgaggagttc

SEQ ID NO: 2473 - DNA, 25 bp, Homo sapiens
aagggcgtagtgtagagacatctca

SEQ ID NO: 2474 - DNA, 25 bp, Homo sapiens
ggttagaagttacgagaccagaagg

SEQ ID NO: 2475 - DNA, 25 bp, Homo sapiens
ggaaaagaagtccataaacctaagg

SEQ ID NO: 2476 - DNA, 24 bp, Homo sapiens
cgactcaggcgcatttccttacga

SEQ ID NO: 2477 - DNA, 25 bp, Homo sapiens
cctagacgggatacggtgactgtaa

SEQ ID NO: 2478 - DNA, 24 bp, Homo sapiens
tgactattgtgttcaccgtagacc

SEQ ID NO: 2479 - DNA, 25 bp, Homo sapiens
cgacacgtagacgacttgtaaggac

SEQ ID NO: 2480 - DNA, 25 bp, Homo sapiens
acccgtatgaagaaagagtagaagg

SEQ ID NO: 2481 - DNA, 25 bp, Homo sapiens
aattatgtttactaagaagactgaa

SEQ ID NO: 2482 - DNA, 23 bp, Homo sapiens
taagacctacaactaccccgtgt

SEQ ID NO: 2483 - DNA, 24 bp, Homo sapiens
tgattgggtgagtcgcctgtaaca

SEQ ID NO: 2484 - DNA, 25 bp, Homo sapiens
ttactggtccaacttgagaaggtcg

SEQ ID NO: 2485 - DNA, 24 bp, Homo sapiens
tgacggagtaaactaccacccagg

SEQ ID NO: 2486 - DNA, 24 bp, Homo sapiens
acggtacctaacgaactaccattt

SEQ ID NO: 2487 - DNA, 24 bp, Homo sapiens
cggtacctaacgaactaccattta

SEQ ID NO: 2488 - DNA, 24 bp, Homo sapiens
gacggtacctaacgaactaccatt

SEQ ID NO: 2489 - DNA, 25 bp, Homo sapiens
acagaggttcagaagtcacaatcgt

SEQ ID NO: 2490 - DNA, 23 bp, Homo sapiens
cggtcctttcctcgtcttcccat

SEQ ID NO: 2491 - DNA, 25 bp, Homo sapiens
aatcgtgttgttattcaggaaccgc

SEQ ID NO: 2492 - DNA, 25 bp, Homo sapiens
taccacttattgacagaggttcaga

SEQ ID NO: 2493 - DNA, 23 bp, Homo sapiens
cggtcctttcctcgtcttcccat

SEQ ID NO: 2494 - DNA, 24 bp, Homo sapiens
agttaaagaggaagtgtgtaagga

SEQ ID NO: 2495 - DNA, 24 bp, Homo sapiens
aaggttcagtgtattgactaagaa

SEQ ID NO: 2496 - DNA, 24 bp, Homo sapiens
tactcgtggcaagaggttcctgtt

SEQ ID NO: 2497 - DNA, 24 bp, Homo sapiens
agtagtctttagacacctaaatga

SEQ ID NO: 2498 - DNA, 24 bp, Homo sapiens
tgggtctgaatggagtaacgaaga

SEQ ID NO: 2499 - DNA, 24 bp, Homo sapiens
gggtctgaatggagtaacgaagag

SEQ ID NO: 2500 - DNA, 24 bp, Homo sapiens
ctgggtctgaatggagtaacgaag

SEQ ID NO: 2501 - DNA, 24 bp, Homo sapiens
acgaaacttatggatgccccttta

SEQ ID NO: 2502 - DNA, 24 bp, Homo sapiens
cgaaacttatggatgcccctttag

SEQ ID NO: 2503 - DNA, 24 bp, Homo sapiens
aacgaaacttatggatgccccttt

SEQ ID NO: 2504 - DNA, 24 bp, Homo sapiens
tcgtcgaggtattatcaagaacaa

SEQ ID NO: 2505 - DNA, 24 bp, Homo sapiens
tggtaaggtgttcagtctggttca

SEQ ID NO: 2506 - DNA, 24 bp, Homo sapiens
aattacccagggagaagtcaccgt

SEQ ID NO: 2507 - DNA, 24 bp, Homo sapiens
ccctccgtcgcttcctaaagacta

SEQ ID NO: 2508 - DNA, 24 bp, Homo sapiens
agaaacgtcttatccgaagtctgt

SEQ ID NO: 2509 - DNA, 24 bp, Homo sapiens
atatgaacgtccgggtcgtggttt

SEQ ID NO: 2510 - DNA, 24 bp, Homo sapiens
aacgacagatcggatttgtgggtt

SEQ ID NO: 2511 - DNA, 24 bp, Homo sapiens
acgacagatcggatttgtgggttt

SEQ ID NO: 2512 - DNA, 24 bp, Homo sapiens
caacgacagatcggatttgtgggt

SEQ ID NO: 2513 - DNA, 24 bp, Homo sapiens
cgtaaacttcggtaaggacaaccc

SEQ ID NO: 2514 - DNA, 24 bp, Homo sapiens
gtaggactcttctagggcggacta

SEQ ID NO: 2515 - DNA, 24 bp, Homo sapiens
ggttactgttcaggtggttctacg

SEQ ID NO: 2516 - DNA, 24 bp, Homo sapiens
tgactggtaggtacagaacatgaa

SEQ ID NO: 2517 - DNA, 25 bp, Homo sapiens
actatgttcaacttcaacagacatc

SEQ ID NO: 2518 - DNA, 25 bp, Homo sapiens
accgttcaccagtaaatgtagtagt

SEQ ID NO: 2519 - DNA, 25 bp, Homo sapiens
gcagaacttcatattacgggtcaca

SEQ ID NO: 2520 - DNA, 23 bp, Homo sapiens
tagttggcgttgttagaggcgtc

SEQ ID NO: 2521 - DNA, 25 bp, Homo sapiens
aggtctgatttcagtttcccacccg

SEQ ID NO: 2522 - DNA, 24 bp, Homo sapiens
gtcaacaccagtgaaccgctaaca

SEQ ID NO: 2523 - DNA, 24 bp, Homo sapiens
tcaacaccagtgaaccgctaacag

SEQ ID NO: 2524 - DNA, 24 bp, Homo sapiens
agtcaacaccagtgaaccgctaac

SEQ ID NO: 2525 - DNA, 24 bp, Homo sapiens
gggcccgaagtagacacttgtgtt

SEQ ID NO: 2526 - DNA, 24 bp, Homo sapiens
ggcccgaagtagacacttgtgttt

SEQ ID NO: 2527 - DNA, 24 bp, Homo sapiens
ggggcccgaagtagacacttgtgt

SEQ ID NO: 2528 - DNA, 24 bp, Homo sapiens
ctgctgttacaactatactcagaa

SEQ ID NO: 2529 - DNA, 24 bp, Homo sapiens
ccacctgaacgggcttagatgcac

SEQ ID NO: 2530 - DNA, 24 bp, Homo sapiens
tggcgtaaatatctagtctaccgg

SEQ ID NO: 2531 - DNA, 25 bp, Homo sapiens
acaagagaggtgtcaaaccggcaaa

SEQ ID NO: 2532 - DNA, 23 bp, Homo sapiens
tcccttccacgcccatgaagtcg

SEQ ID NO: 2533 - DNA, 23 bp, Homo sapiens
cacaaagacaaggacgggctgaa

SEQ ID NO: 2534 - DNA, 24 bp, Homo sapiens
cccgcggggtgcgacttctctcct

SEQ ID NO: 2535 - DNA, 24 bp, Homo sapiens
ccgcggggtgcgacttctctcctt

SEQ ID NO: 2536 - DNA, 24 bp, Homo sapiens
acccgcggggtgcgacttctctcc

SEQ ID NO: 2537 - DNA, 23 bp, Homo sapiens
tactgtgttcagccgtccgccac

SEQ ID NO: 2538 - DNA, 25 bp, Homo sapiens
aggacatcacagaaggtgtagccgt

SEQ ID NO: 2539 - DNA, 25 bp, Homo sapiens
cggagaaacgaagaagtgaaaggag

SEQ ID NO: 2540 - DNA, 23 bp, Homo sapiens
tactgtgttcagccgtccgccac

SEQ ID NO: 2541 - DNA, 23 bp, Homo sapiens
aagaagtgaggaccgtccgaccg

SEQ ID NO: 2542 - DNA, 25 bp, Homo sapiens
aggacatcacagaaggtgtagccgt

SEQ ID NO: 2543 - DNA, 24 bp, Homo sapiens
ttgttagactccattaccgtggtt

SEQ ID NO: 2544 - DNA, 23 bp, Homo sapiens
cgtggagcaggaaccaaggagaa

SEQ ID NO: 2545 - DNA, 23 bp, Homo sapiens
tacaaaggacgaaccgacgaggg

SEQ ID NO: 2546 - DNA, 24 bp, Homo sapiens
gtcgtagttacggaagtattggta

SEQ ID NO: 2547 - DNA, 24 bp, Homo sapiens
agtttggacgagaatcccgaagaa

SEQ ID NO: 2548 - DNA, 25 bp, Homo sapiens
aactataataaggaaggtcggactt

SEQ ID NO: 2549 - DNA, 25 bp, Homo sapiens
aggatgaagtaggacgttaaggtcg

SEQ ID NO: 2550 - DNA, 24 bp, Homo sapiens
aaggaccgttcgtcgtattcgagg

SEQ ID NO: 2551 - DNA, 24 bp, Homo sapiens
ggtgtcgtagtggacggaggtcct

SEQ ID NO: 2552 - DNA, 24 bp, Homo sapiens
gtgtcgtagtggacggaggtcctc

SEQ ID NO: 2553 - DNA, 24 bp, Homo sapiens
gggtgtcgtagtggacggaggtcc

SEQ ID NO: 2554 - DNA, 24 bp, Homo sapiens
ttgtggagaatggtctcgtctttg

SEQ ID NO: 2555 - DNA, 24 bp, Homo sapiens
tgtggagaatggtctcgtctttga

SEQ ID NO: 2556 - DNA, 24 bp, Homo sapiens
cttgtggagaatggtctcgtcttt

SEQ ID NO: 2557 - DNA, 23 bp, Homo sapiens
cgaaagccttcaagtgtcagtga

SEQ ID NO: 2558 - DNA, 25 bp, Homo sapiens
gaaagagtttgaggaagactgtagc

SEQ ID NO: 2559 - DNA, 25 bp, Homo sapiens
acgaagaagagtttttggagtagta

SEQ ID NO: 2560 - DNA, 24 bp, Homo sapiens
ccgagtatcgagtcgtctacgacc

SEQ ID NO: 2561 - DNA, 24 bp, Homo sapiens
ggagacagacgtccgagaggaaga

SEQ ID NO: 2562 - DNA, 24 bp, Homo sapiens
ctacgaccatctccacccctctgt

SEQ ID NO: 2563 - DNA, 24 bp, Homo sapiens
attctaaacctcgatcctttgttt

SEQ ID NO: 2564 - DNA, 24 bp, Homo sapiens
ttctaaacctcgatcctttgtttg

SEQ ID NO: 2565 - DNA, 24 bp, Homo sapiens
aattctaaacctcgatcctttgtt

SEQ ID NO: 2566 - DNA, 24 bp, Homo sapiens
cagagggtcggtcctttgaactgt

SEQ ID NO: 2567 - DNA, 23 bp, Homo sapiens
accgttcgtctccttcagccatt

SEQ ID NO: 2568 - DNA, 25 bp, Homo sapiens
cgacttggttcttgtgtgcccttag

SEQ ID NO: 2569 - DNA, 23 bp, Homo sapiens
ggaggttcgtcggcaggtctcac

SEQ ID NO: 2570 - DNA, 23 bp, Homo sapiens
gggtcggtcctttgaactgtggt

SEQ ID NO: 2571 - DNA, 23 bp, Homo sapiens
accgttcgtctccttcagccatt

SEQ ID NO: 2572 - DNA, 24 bp, Homo sapiens
tgtgcttgacaggaacctcgacga

SEQ ID NO: 2573 - DNA, 24 bp, Homo sapiens
gtgcttgacaggaacctcgacgac

SEQ ID NO: 2574 - DNA, 24 bp, Homo sapiens
gtgtgcttgacaggaacctcgacg

SEQ ID NO: 2575 - DNA, 25 bp, Homo sapiens
accgaagttaccattctcgactgag

SEQ ID NO: 2576 - DNA, 25 bp, Homo sapiens
acagaggtcctaagtttatcgtggt

SEQ ID NO: 2577 - DNA, 25 bp, Homo sapiens
agtctcccatatctctcttacgcct

SEQ ID NO: 2578 - DNA, 25 bp, Homo sapiens
gtagttaccgttgtatatggacact

SEQ ID NO: 2579 - DNA, 25 bp, Homo sapiens
agaacttgagtggaagaaggtagag

SEQ ID NO: 2580 - DNA, 25 bp, Homo sapiens
gatgtctccttctgtactcggaacg

SEQ ID NO: 2581 - DNA, 25 bp, Homo sapiens
acgaccaatttacgaaagacgacgc

SEQ ID NO: 2582 - DNA, 23 bp, Homo sapiens
tttgtttcggttgtgaggagcaa

SEQ ID NO: 2583 - DNA, 25 bp, Homo sapiens
tcacggttgtatatgaaagatcggg

SEQ ID NO: 2584 - DNA, 23 bp, Homo sapiens
ctttctgtgtggcgggtggactg

SEQ ID NO: 2585 - DNA, 24 bp, Homo sapiens
gggttcagggctctgtaaaggtgc

SEQ ID NO: 2586 - DNA, 25 bp, Homo sapiens
ctcttttacgtggagtcctcgtttt

SEQ ID NO: 2587 - DNA, 24 bp, Homo sapiens
aaagggaagacgcatagcagaaga

SEQ ID NO: 2588 - DNA, 24 bp, Homo sapiens
aagggaagacgcatagcagaagat

SEQ ID NO: 2589 - DNA, 24 bp, Homo sapiens
aaaagggaagacgcatagcagaag

SEQ ID NO: 2590 - DNA, 24 bp, Homo sapiens
gtggtcccctccaggaagaggaca

SEQ ID NO: 2591 - DNA, 24 bp, Homo sapiens
tggtcccctccaggaagaggacac

SEQ ID NO: 2592 - DNA, 24 bp, Homo sapiens
agtggtcccctccaggaagaggac

SEQ ID NO: 2593 - DNA, 23 bp, Homo sapiens
agtcggaaggacactaagaagcc

SEQ ID NO: 2594 - DNA, 25 bp, Homo sapiens
cccaccaaactcacaccatccgaac

SEQ ID NO: 2595 - DNA, 23 bp, Homo sapiens
atcctacgaacgcttgtgctgta

SEQ ID NO: 2596 - DNA, 25 bp, Homo sapiens
agtcggaaggacactaagaagccta

SEQ ID NO: 2597 - DNA, 23 bp, Homo sapiens
aactcacaccatccgaacgtccg

SEQ ID NO: 2598 - DNA, 24 bp, Homo sapiens
gacgatcctacgaacgcttgtgct

SEQ ID NO: 2599 - DNA, 23 bp, Homo sapiens
tcccaacttgaggagcaccatcc

SEQ ID NO: 2600 - DNA, 24 bp, Homo sapiens
aagtaatagtagactagctgccta

SEQ ID NO: 2601 - DNA, 23 bp, Homo sapiens
aactcacaccatccgaacgtccg

SEQ ID NO: 2602 - DNA, 24 bp, Homo sapiens
gacgatcctacgaacgcttgtgct

SEQ ID NO: 2603 - DNA, 24 bp, Homo sapiens
aagccgagagtggacgtggttagt

SEQ ID NO: 2604 - DNA, 24 bp, Homo sapiens
agccgagagtggacgtggttagtg

SEQ ID NO: 2605 - DNA, 24 bp, Homo sapiens
gaagccgagagtggacgtggttag

SEQ ID NO: 2606 - DNA, 24 bp, Homo sapiens
agtaagtgtctaagcatcagtcgt

SEQ ID NO: 2607 - DNA, 24 bp, Homo sapiens
acactatctccctgacaaccctaa

SEQ ID NO: 2608 - DNA, 24 bp, Homo sapiens
tcgactccagacggtctagtagct

SEQ ID NO: 2609 - DNA, 24 bp, Homo sapiens
gatacggacgatgaaatgtctcta

SEQ ID NO: 2610 - DNA, 24 bp, Homo sapiens
tgtgtagtacgactcggtggtctt

SEQ ID NO: 2611 - DNA, 24 bp, Homo sapiens
tgaagttgtggttcccgaagacga

SEQ ID NO: 2612 - DNA, 24 bp, Homo sapiens
ggatgtagcaatcaccgttaagga

SEQ ID NO: 2613 - DNA, 24 bp, Homo sapiens
aggtcaggagagagtttacaacgg

SEQ ID NO: 2614 - DNA, 24 bp, Homo sapiens
tacgaaccgttagacaaccctatc

SEQ ID NO: 2615 - DNA, 24 bp, Homo sapiens
acgaaccgttagacaaccctatcg

SEQ ID NO: 2616 - DNA, 24 bp, Homo sapiens
gtacgaaccgttagacaaccctat

SEQ ID NO: 2617 - DNA, 24 bp, Homo sapiens
tacgaaccgttagaatgttttacg

SEQ ID NO: 2618 - DNA, 24 bp, Homo sapiens
acgaaccgttagaatgttttacga

SEQ ID NO: 2619 - DNA, 24 bp, Homo sapiens
gtacgaaccgttagaatgttttac

SEQ ID NO: 2620 - DNA, 25 bp, Homo sapiens
cttatctgaacctcttatactcgga

SEQ ID NO: 2621 - DNA, 25 bp, Homo sapiens
tggtgaagaaaagaacagaagaaaa

SEQ ID NO: 2622 - DNA, 23 bp, Homo sapiens
ttttagactaatattgcactaaa

SEQ ID NO: 2623 - DNA, 25 bp, Homo sapiens
tccgttctacatccattacaggaca

SEQ ID NO: 2624 - DNA, 24 bp, Homo sapiens
ggtgtctgcccatatcaaacgaaa

SEQ ID NO: 2625 - DNA, 25 bp, Homo sapiens
cgatgctacactctacaaagtccgt

SEQ ID NO: 2626 - DNA, 25 bp, Homo sapiens
tccgttctacatccattacaggaca

SEQ ID NO: 2627 - DNA, 24 bp, Homo sapiens
ggtgtctgcccatatcaaacgaaa

SEQ ID NO: 2628 - DNA, 23 bp, Homo sapiens
tgacttagggtccttcttcatga

SEQ ID NO: 2629 - DNA, 24 bp, Homo sapiens
acggtagacctattgacagaagac

SEQ ID NO: 2630 - DNA, 24 bp, Homo sapiens
ttaatactggtggcgaggaagttc

SEQ ID NO: 2631 - DNA, 24 bp, Homo sapiens
cgactcagtgacccaggtaaagga

SEQ ID NO: 2632 - DNA, 24 bp, Homo sapiens
agtagtgaatagagcagacggagt

SEQ ID NO: 2633 - DNA, 24 bp, Homo sapiens
cggtcatctgctgtggtcgttgtt

SEQ ID NO: 2634 - DNA, 24 bp, Homo sapiens
gaaggtataatggctccaggaaca

SEQ ID NO: 2635 - DNA, 24 bp, Homo sapiens
ggagtaggtgtctaggttgtcggc

SEQ ID NO: 2636 - DNA, 24 bp, Homo sapiens
cgaaacgcagcagagttacccttg

SEQ ID NO: 2637 - DNA, 25 bp, Homo sapiens
acagaagggtcgtggatttatgggc

SEQ ID NO: 2638 - DNA, 24 bp, Homo sapiens
catcatcggtcggactttttatac

SEQ ID NO: 2639 - DNA, 24 bp, Homo sapiens
atcatcggtcggactttttatact

SEQ ID NO: 2640 - DNA, 24 bp, Homo sapiens
tcatcatcggtcggactttttata

SEQ ID NO: 2641 - DNA, 24 bp, Homo sapiens
cattgacctccggttcgtgaactt

SEQ ID NO: 2642 - DNA, 24 bp, Homo sapiens
attgacctccggttcgtgaacttc

SEQ ID NO: 2643 - DNA, 24 bp, Homo sapiens
ccattgacctccggttcgtgaact

SEQ ID NO: 2644 - DNA, 24 bp, Homo sapiens
ccatccacggtaacactgaataca

SEQ ID NO: 2645 - DNA, 24 bp, Homo sapiens
aggacgactacacatcgctacgaa

SEQ ID NO: 2646 - DNA, 24 bp, Homo sapiens
tcggagcgtggtcatattgggtct

SEQ ID NO: 2647 - DNA, 24 bp, Homo sapiens
acaaactaagtggacgttactgtt

SEQ ID NO: 2648 - DNA, 24 bp, Homo sapiens
caaactaagtggacgttactgtta

SEQ ID NO: 2649 - DNA, 24 bp, Homo sapiens
tacaaactaagtggacgttactgt

SEQ ID NO: 2650 - DNA, 25 bp, Homo sapiens
ttacaagtcttctattctacacgca

SEQ ID NO: 2651 - DNA, 25 bp, Homo sapiens
aggtcttccctacaaactaagtgga

SEQ ID NO: 2652 - DNA, 23 bp, Homo sapiens
tactgtaccgtcgtaagacctgc

SEQ ID NO: 2653 - DNA, 25 bp, Homo sapiens
tgacaagaacgtacttcaaacacca

SEQ ID NO: 2654 - DNA, 25 bp, Homo sapiens
aggtcttccctacaaactaagtgga

SEQ ID NO: 2655 - DNA, 25 bp, Homo sapiens
taccgtcgtaagacctgcaatcctg

SEQ ID NO: 2656 - DNA, 25 bp, Homo sapiens
acacaggtcttcttacaccgttact

SEQ ID NO: 2657 - DNA, 23 bp, Homo sapiens
agttgtatgtaaggatatcaaga

SEQ ID NO: 2658 - DNA, 24 bp, Homo sapiens
acaagtcttctattctacacgcat

SEQ ID NO: 2659 - DNA, 25 bp, Homo sapiens
acacaggtcttcttacaccgttact

SEQ ID NO: 2660 - DNA, 25 bp, Homo sapiens
ttacaagtcttctattctacacgca

SEQ ID NO: 2661 - DNA, 25 bp, Homo sapiens
tctcgcactaccacttactgtaccg

SEQ ID NO: 2662 - DNA, 25 bp, Homo sapiens
catgacctaccctttaccgtaagta

SEQ ID NO: 2663 - DNA, 25 bp, Homo sapiens
acacaggtcttcttacaccgttact

SEQ ID NO: 2664 - DNA, 25 bp, Homo sapiens
ttacaagtcttctattctacacgca

SEQ ID NO: 2665 - DNA, 24 bp, Homo sapiens
caatgaccaccagttgtctacgaa

SEQ ID NO: 2666 - DNA, 25 bp, Homo sapiens
aaggaaatcgagtccactattacca

SEQ ID NO: 2667 - DNA, 25 bp, Homo sapiens
ccacctctagaatcctggtaaccaa

SEQ ID NO: 2668 - DNA, 25 bp, Homo sapiens
ccaagaagaggtaagactagcgtta

SEQ ID NO: 2669 - DNA, 24 bp, Homo sapiens
ttcacgaagaagatcgactcgacg

SEQ ID NO: 2670 - DNA, 25 bp, Homo sapiens
aggtagactaactggacggtgactt

SEQ ID NO: 2671 - DNA, 25 bp, Homo sapiens
ccacctctagaatcctggtaaccaa

SEQ ID NO: 2672 - DNA, 25 bp, Homo sapiens
gctaccttacccgtttcgtatggca

SEQ ID NO: 2673 - DNA, 25 bp, Homo sapiens
ccaagaagaggtaagactagcgtta

SEQ ID NO: 2674 - DNA, 23 bp, Homo sapiens
ggtgaacgtaacaacagagtcaa

SEQ ID NO: 2675 - DNA, 25 bp, Homo sapiens
acaggaaacaggtggacttagactt

SEQ ID NO: 2676 - DNA, 25 bp, Homo sapiens
ccgtcactagacacctataagaacc

SEQ ID NO: 2677 - DNA, 25 bp, Homo sapiens
acgaggacttcctgaaacaagagtt

SEQ ID NO: 2678 - DNA, 23 bp, Homo sapiens
ggtgaacgtaacaacagagtcaa

SEQ ID NO: 2679 - DNA, 25 bp, Homo sapiens
acaggaaacaggtggacttagactt

SEQ ID NO: 2680 - DNA, 25 bp, Homo sapiens
actaagttcacaacgagagtctcca

SEQ ID NO: 2681 - DNA, 24 bp, Homo sapiens
accctccctcacgaccagttctta

SEQ ID NO: 2682 - DNA, 25 bp, Homo sapiens
tccgtcatggactaccaaaggttct

SEQ ID NO: 2683 - DNA, 24 bp, Homo sapiens
gtttgattacgagagaggacgact

SEQ ID NO: 2684 - DNA, 24 bp, Homo sapiens
tttgattacgagagaggacgactg

SEQ ID NO: 2685 - DNA, 24 bp, Homo sapiens
ggtttgattacgagagaggacgac

SEQ ID NO: 2686 - DNA, 24 bp, Homo sapiens
aaacattcctcaggtcttcgtccc

SEQ ID NO: 2687 - DNA, 24 bp, Homo sapiens
acactgttctgaccaatagaccga

SEQ ID NO: 2688 - DNA, 24 bp, Homo sapiens
aacaagaaatcgtcggcaacaaga

SEQ ID NO: 2689 - DNA, 25 bp, Homo sapiens
tattctcacggttcgaggaactaag

SEQ ID NO: 2690 - DNA, 25 bp, Homo sapiens
ttctcacggttcgaggaactaagcc

SEQ ID NO: 2691 - DNA, 25 bp, Homo sapiens
ctctggcgaacacctggtcacttaa

SEQ ID NO: 2692 - DNA, 24 bp, Homo sapiens
cctacaaccccagaaaaccaaagc

SEQ ID NO: 2693 - DNA, 25 bp, Homo sapiens
gggaggtaaataggagacgaaggac

SEQ ID NO: 2694 - DNA, 25 bp, Homo sapiens
agactcttacaccgaaattaaacga

SEQ ID NO: 2695 - DNA, 25 bp, Homo sapiens
aggacaacaaagaaatcaagaaggt

SEQ ID NO: 2696 - DNA, 25 bp, Homo sapiens
aagtaggattgctctgtcgtgtcgt

SEQ ID NO: 2697 - DNA, 25 bp, Homo sapiens
aggagagagggagaggtcttcgtct

SEQ ID NO: 2698 - DNA, 25 bp, Homo sapiens
cggtgtgtctttcgtcttccttgtg

SEQ ID NO: 2699 - DNA, 25 bp, Homo sapiens
aacgacttagttaagagttgactcg

SEQ ID NO: 2700 - DNA, 25 bp, Homo sapiens
ccgatcaaataagtcaggtgcctct

SEQ ID NO: 2701 - DNA, 25 bp, Homo sapiens
gcttgaagtcctctcctatctcagt

SEQ ID NO: 2702 - DNA, 25 bp, Homo sapiens
ccgatcaaataagtcaggtgcctct

SEQ ID NO: 2703 - DNA, 25 bp, Homo sapiens
gcttgaagtcctctcctatctcagt

SEQ ID NO: 2704 - DNA, 25 bp, Homo sapiens
tcctagcactcaaagtgacaggtac

SEQ ID NO: 2705 - DNA, 25 bp, Homo sapiens
caagacctacatgagcacaagatcg

SEQ ID NO: 2706 - DNA, 23 bp, Homo sapiens
cgtcggtgtcccagtatcagaaa

SEQ ID NO: 2707 - DNA, 23 bp, Homo sapiens
cctcgttgttcccttcctcggtg

SEQ ID NO: 2708 - DNA, 25 bp, Homo sapiens
gtcgtgtgcgttactatgtaaggac

SEQ ID NO: 2709 - DNA, 25 bp, Homo sapiens
agtagacacttggagttctcgtccg

SEQ ID NO: 2710 - DNA, 25 bp, Homo sapiens
tggataacaacgacgttcaagacct

SEQ ID NO: 2711 - DNA, 25 bp, Homo sapiens
tggagagaactggtcgtcatagggt

SEQ ID NO: 2712 - DNA, 25 bp, Homo sapiens
tgaactgaaccttctacaacgaggc

SEQ ID NO: 2713 - DNA, 25 bp, Homo sapiens
tgactacgacttgaaggatagcaga

SEQ ID NO: 2714 - DNA, 23 bp, Homo sapiens
cgacatcggtcatcagacaagcc

SEQ ID NO: 2715 - DNA, 25 bp, Homo sapiens
aagacaagacggaagtgttcacgaa

SEQ ID NO: 2716 - DNA, 25 bp, Homo sapiens
actactggtgtccctgaagaagcaa

SEQ ID NO: 2717 - DNA, 25 bp, Homo sapiens
acaaggtaagtgaggctcggaatcg

SEQ ID NO: 2718 - DNA, 25 bp, Homo sapiens
actactggtgtccctgaagaagcaa

SEQ ID NO: 2719 - DNA, 25 bp, Homo sapiens
acaaggtaagtgaggctcggaatcg

SEQ ID NO: 2720 - DNA, 25 bp, Homo sapiens
acctaagacacctaaagaagaacga

SEQ ID NO: 2721 - DNA, 25 bp, Homo sapiens
actactggtgtccctgaagaagcaa

SEQ ID NO: 2722 - DNA, 25 bp, Homo sapiens
acaaggtaagtgaggctcggaatcg

SEQ ID NO: 2723 - DNA, 23 bp, Homo sapiens
cgacgaacaggagtcttagtgac

SEQ ID NO: 2724 - DNA, 25 bp, Homo sapiens
aggactcttacataccacgacacta

SEQ ID NO: 2725 - DNA, 25 bp, Homo sapiens
ccattccaagtgtcaatctattacg

SEQ ID NO: 2726 - DNA, 24 bp, Homo sapiens
tactccgttacttccgactcaagg

SEQ ID NO: 2727 - DNA, 24 bp, Homo sapiens
gagttccttatcgacgtgatttcg

SEQ ID NO: 2728 - DNA, 24 bp, Homo sapiens
agttccttatcgacgtgatttcgg

SEQ ID NO: 2729 - DNA, 24 bp, Homo sapiens
cgagttccttatcgacgtgatttc

SEQ ID NO: 2730 - DNA, 24 bp, Homo sapiens
agactagccttggttgacctgcta

SEQ ID NO: 2731 - DNA, 24 bp, Homo sapiens
gactagccttggttgacctgctaa

SEQ ID NO: 2732 - DNA, 24 bp, Homo sapiens
aagactagccttggttgacctgct

SEQ ID NO: 2733 - DNA, 24 bp, Homo sapiens
aaataggtccctgtttgtctaccc

SEQ ID NO: 2734 - DNA, 24 bp, Homo sapiens
aataggtccctgtttgtctaccct

SEQ ID NO: 2735 - DNA, 24 bp, Homo sapiens
gaaataggtccctgtttgtctacc

SEQ ID NO: 2736 - DNA, 25 bp, Homo sapiens
cccatcaggaagagacaaacacaca

SEQ ID NO: 2737 - DNA, 25 bp, Homo sapiens
actctattatgacttccacaagacg

SEQ ID NO: 2738 - DNA, 25 bp, Homo sapiens
ttggtgttgtcttgatctgtaatcg

SEQ ID NO: 2739 - DNA, 24 bp, Homo sapiens
aaggagctagtggaaacgataaag

SEQ ID NO: 2740 - DNA, 24 bp, Homo sapiens
aggagctagtggaaacgataaagg

SEQ ID NO: 2741 - DNA, 24 bp, Homo sapiens
aaaggagctagtggaaacgataaa

SEQ ID NO: 2742 - DNA, 24 bp, Homo sapiens
ctctgtcgtaaggacccccctttt

SEQ ID NO: 2743 - DNA, 24 bp, Homo sapiens
tctgtcgtaaggaccccccttttc

SEQ ID NO: 2744 - DNA, 24 bp, Homo sapiens
tctctgtcgtaaggaccccccttt

SEQ ID NO: 2745 - DNA, 24 bp, Homo sapiens
gctctacgcctgctatctcggaag

SEQ ID NO: 2746 - DNA, 25 bp, Homo sapiens
ggacaaggtaaccgaggttgctagt

SEQ ID NO: 2747 - DNA, 25 bp, Homo sapiens
cgatttggttccgtttaccgtgtgt

SEQ ID NO: 2748 - DNA, 25 bp, Homo sapiens
tctaaaggtcttcgggacttgttaa

SEQ ID NO: 2749 - DNA, 23 bp, Homo sapiens
aaacggtgtagttagagtgccca

SEQ ID NO: 2750 - DNA, 25 bp, Homo sapiens
ggactccctctttgaccgtttctaa

SEQ ID NO: 2751 - DNA, 23 bp, Homo sapiens
aaacggtgtagttagagtgccca

SEQ ID NO: 2752 - DNA, 25 bp, Homo sapiens
ggactccctctttgaccgtttctaa

SEQ ID NO: 2753 - DNA, 25 bp, Homo sapiens
aagtcaccgaagctcctcaagttaa

SEQ ID NO: 2754 - DNA, 25 bp, Homo sapiens
tgtttgcggacacagactttacatc

SEQ ID NO: 2755 - DNA, 25 bp, Homo sapiens
tgtagaggagtgacaaatccaacgc

SEQ ID NO: 2756 - DNA, 25 bp, Homo sapiens
accttcagtgatattgctgctatcc

SEQ ID NO: 2757 - DNA, 25 bp, Homo sapiens
tacgaaggacatcctctgggtaatt

SEQ ID NO: 2758 - DNA, 25 bp, Homo sapiens
taccgtatattacgtatacagaacg

SEQ ID NO: 2759 - DNA, 25 bp, Homo sapiens
tgtagaggagtgacaaatccaacgc

SEQ ID NO: 2760 - DNA, 25 bp, Homo sapiens
accttcagtgatattgctgctatcc

SEQ ID NO: 2761 - DNA, 23 bp, Homo sapiens
cgatttcgccccctacggaagta

SEQ ID NO: 2762 - DNA, 25 bp, Homo sapiens
tgacatccgaaacaagagttccttt

SEQ ID NO: 2763 - DNA, 24 bp, Homo sapiens
ctttgagccgctacaagtcccaga

SEQ ID NO: 2764 - DNA, 25 bp, Homo sapiens
aggagtaacttaacgcttcacctaa

SEQ ID NO: 2765 - DNA, 23 bp, Homo sapiens
aaatcagtaagggagacggttcg

SEQ ID NO: 2766 - DNA, 24 bp, Homo sapiens
ctttgagccgctacaagtcccaga

SEQ ID NO: 2767 - DNA, 25 bp, Homo sapiens
aggtgtaatagcagttcaactcggc

SEQ ID NO: 2768 - DNA, 25 bp, Homo sapiens
actcttcgtcgtaatgggattcacc

SEQ ID NO: 2769 - DNA, 25 bp, Homo sapiens
actataaggaagcgttggtgactaa

SEQ ID NO: 2770 - DNA, 23 bp, Homo sapiens
gcaagaccagccagagccagaga

SEQ ID NO: 2771 - DNA, 25 bp, Homo sapiens
ggaagacggaacagtagaagtgacc

SEQ ID NO: 2772 - DNA, 25 bp, Homo sapiens
agaggtggaagaagtagccgaagga

SEQ ID NO: 2773 - DNA, 24 bp, Homo sapiens
cgtgaggtactagacgactacacc

SEQ ID NO: 2774 - DNA, 24 bp, Homo sapiens
gtgaggtactagacgactacaccc

SEQ ID NO: 2775 - DNA, 24 bp, Homo sapiens
acgtgaggtactagacgactacac

SEQ ID NO: 2776 - DNA, 24 bp, Homo sapiens
ttctcagaccacaaccaggaagcc

SEQ ID NO: 2777 - DNA, 23 bp, Homo sapiens
tcacactgtctctgactgacgaa

SEQ ID NO: 2778 - DNA, 23 bp, Homo sapiens
gacgctaccacggtccaacctaa

SEQ ID NO: 2779 - DNA, 25 bp, Homo sapiens
cgtcggacagaaggaagaaatgggt

SEQ ID NO: 2780 - DNA, 25 bp, Homo sapiens
agtccatgtgcgacagtatgttaca

SEQ ID NO: 2781 - DNA, 25 bp, Homo sapiens
tactcccagatgtacgacaaggttt

SEQ ID NO: 2782 - DNA, 24 bp, Homo sapiens
gacctcgattcccactccgacctt

SEQ ID NO: 2783 - DNA, 24 bp, Homo sapiens
acctcgattcccactccgaccttg

SEQ ID NO: 2784 - DNA, 24 bp, Homo sapiens
tgacctcgattcccactccgacct

SEQ ID NO: 2785 - DNA, 25 bp, Homo sapiens
tttagatgacaaccgaaagtgaacg

SEQ ID NO: 2786 - DNA, 25 bp, Homo sapiens
ggtggttactgctcctatgtattcc

SEQ ID NO: 2787 - DNA, 25 bp, Homo sapiens
aggttctcattaagtgttatcgtca

SEQ ID NO: 2788 - DNA, 23 bp, Homo sapiens
ttatatcgaacgtggtcactacc

SEQ ID NO: 2789 - DNA, 24 bp, Homo sapiens
tcacgagcttgaagtagtcctaga

SEQ ID NO: 2790 - DNA, 24 bp, Homo sapiens
agtgaagtcgaggtacgctgtgtt

SEQ ID NO: 2791 - DNA, 24 bp, Homo sapiens
ctagtaaggtgatctccgacgacg

SEQ ID NO: 2792 - DNA, 25 bp, Homo sapiens
gttgtagaacaggtaatatcgtccg

SEQ ID NO: 2793 - DNA, 24 bp, Homo sapiens
gtcgacaagtcgatcgaagaagaa

SEQ ID NO: 2794 - DNA, 25 bp, Homo sapiens
tgagacttaaccaaaacacttgggt

SEQ ID NO: 2795 - DNA, 25 bp, Homo sapiens
agaacgtcgagacattacttgagcg

SEQ ID NO: 2796 - DNA, 25 bp, Homo sapiens
tgtaacatatgaagccgtaggtcgt

SEQ ID NO: 2797 - DNA, 25 bp, Homo sapiens
cgtaatttcgctagggagtgtcttc

SEQ ID NO: 2798 - DNA, 24 bp, Homo sapiens
gtcgacaagtcgatcgaagaagaa

SEQ ID NO: 2799 - DNA, 25 bp, Homo sapiens
tgagacttaaccaaaacacttgggt

SEQ ID NO: 2800 - DNA, 25 bp, Homo sapiens
gagatggtataacgacagtgacagt

SEQ ID NO: 2801 - DNA, 24 bp, Homo sapiens
agaccgtttcttgattgtcgacta

SEQ ID NO: 2802 - DNA, 24 bp, Homo sapiens
gaccgtttcttgattgtcgactac

SEQ ID NO: 2803 - DNA, 24 bp, Homo sapiens
aagaccgtttcttgattgtcgact

SEQ ID NO: 2804 - DNA, 25 bp, Homo sapiens
agagacgctacattagtcagtggaa

SEQ ID NO: 2805 - DNA, 24 bp, Homo sapiens
gacttaagtgtctcaaccgtctta

SEQ ID NO: 2806 - DNA, 24 bp, Homo sapiens
acttaagtgtctcaaccgtcttat

SEQ ID NO: 2807 - DNA, 24 bp, Homo sapiens
tgacttaagtgtctcaaccgtctt

SEQ ID NO: 2808 - DNA, 25 bp, Homo sapiens
acggcatccttgttgttatcctggt

SEQ ID NO: 2809 - DNA, 25 bp, Homo sapiens
gtggaccgacgacaacattacaaga

SEQ ID NO: 2810 - DNA, 25 bp, Homo sapiens
agacgttacattaagccaggttccg

SEQ ID NO: 2811 - DNA, 25 bp, Homo sapiens
gtggaccgacgacaacattacaaga

SEQ ID NO: 2812 - DNA, 25 bp, Homo sapiens
tcgtgtccattcctgtcattctcct

SEQ ID NO: 2813 - DNA, 25 bp, Homo sapiens
tgaagttggctacgaacaagatggc

SEQ ID NO: 2814 - DNA, 24 bp, Homo sapiens
aatgtccgtcgagtctcttaaggt

SEQ ID NO: 2815 - DNA, 24 bp, Homo sapiens
atgtccgtcgagtctcttaaggtc

SEQ ID NO: 2816 - DNA, 24 bp, Homo sapiens
caatgtccgtcgagtctcttaagg

SEQ ID NO: 2817 - DNA, 24 bp, Homo sapiens
ccgtgcactttggtacttactccg

SEQ ID NO: 2818 - DNA, 24 bp, Homo sapiens
cgtgcactttggtacttactccga

SEQ ID NO: 2819 - DNA, 24 bp, Homo sapiens
accgtgcactttggtacttactcc

SEQ ID NO: 2820 - DNA, 25 bp, Homo sapiens
tcagtgaacaccgaaatgacaccgt

SEQ ID NO: 2821 - DNA, 25 bp, Homo sapiens
tacaccgttgatctgaacttctcca

SEQ ID NO: 2822 - DNA, 24 bp, Homo sapiens
acacagggtctccgtttgtaaaga

SEQ ID NO: 2823 - DNA, 24 bp, Homo sapiens
acaccgtccaaacaaccctaattg

SEQ ID NO: 2824 - DNA, 24 bp, Homo sapiens
ccgtgtaggtcgaactagaatacc

SEQ ID NO: 2825 - DNA, 24 bp, Homo sapiens
ttaggaatacacggcggagaaacc

SEQ ID NO: 2826 - DNA, 24 bp, Homo sapiens
acaccgtccaaacaaccctaattg

SEQ ID NO: 2827 - DNA, 24 bp, Homo sapiens
ttaggaatacacggcggagaaacc

SEQ ID NO: 2828 - DNA, 24 bp, Homo sapiens
acacgagcgaaactccactgaagt

SEQ ID NO: 2829 - DNA, 24 bp, Homo sapiens
acacgagcgaaactccactgaagt

SEQ ID NO: 2830 - DNA, 24 bp, Homo sapiens
taatcgtggtactcatggttatcg

SEQ ID NO: 2831 - DNA, 24 bp, Homo sapiens
aacaggtgttagaggacttagtcg

SEQ ID NO: 2832 - DNA, 24 bp, Homo sapiens
acgatgttacttctggtggtctag

SEQ ID NO: 2833 - DNA, 25 bp, Homo sapiens
agttctagtccttgtttagattacc

SEQ ID NO: 2834 - DNA, 25 bp, Homo sapiens
aacgacgaaaattacaaagaagacg

SEQ ID NO: 2835 - DNA, 24 bp, Homo sapiens
ttagtagttcttgtggtctactag

SEQ ID NO: 2836 - DNA, 24 bp, Homo sapiens
tagtagttcttgtggtctactaga

SEQ ID NO: 2837 - DNA, 24 bp, Homo sapiens
attagtagttcttgtggtctacta

SEQ ID NO: 2838 - DNA, 24 bp, Homo sapiens
gcgtggctccttcttaacctgaga

SEQ ID NO: 2839 - DNA, 23 bp, Homo sapiens
tcaggcgtcttagaggtgtcgga

SEQ ID NO: 2840 - DNA, 25 bp, Homo sapiens
tcggtagtttgaggtgattcggtct

SEQ ID NO: 2841 - DNA, 24 bp, Homo sapiens
tccttccggatggacaacgacagg

SEQ ID NO: 2842 - DNA, 24 bp, Homo sapiens
ccttccggatggacaacgacaggt

SEQ ID NO: 2843 - DNA, 24 bp, Homo sapiens
ttccttccggatggacaacgacag

SEQ ID NO: 2844 - DNA, 25 bp, Homo sapiens
acaacgaaaggaagaagcgagtaga

SEQ ID NO: 2845 - DNA, 24 bp, Homo sapiens
ggtggaggaggagagtacgaaggt

SEQ ID NO: 2846 - DNA, 25 bp, Homo sapiens
accgaagaagaaaggtcacacccta

SEQ ID NO: 2847 - DNA, 25 bp, Homo sapiens
acggcatgtagtattggacgaaggt

SEQ ID NO: 2848 - DNA, 23 bp, Homo sapiens
aactaccgtcgggttacctcctc

SEQ ID NO: 2849 - DNA, 25 bp, Homo sapiens
aggttcaactaggtgttatcgtgga

SEQ ID NO: 2850 - DNA, 25 bp, Homo sapiens
cggaactgatacagggtacacgaca

SEQ ID NO: 2851 - DNA, 25 bp, Homo sapiens
acggcatgtagtattggacgaaggt

SEQ ID NO: 2852 - DNA, 23 bp, Homo sapiens
aactaccgtcgggttacctcctc

SEQ ID NO: 2853 - DNA, 23 bp, Homo sapiens
aactaccgtcgggttacctcctc

SEQ ID NO: 2854 - DNA, 25 bp, Homo sapiens
aggttcaactaggtgttatcgtgga

SEQ ID NO: 2855 - DNA, 24 bp, Homo sapiens
tccatacaggcttgactcgtcggt

SEQ ID NO: 2856 - DNA, 25 bp, Homo sapiens
ttggacgaaggtggttaagagctgt

SEQ ID NO: 2857 - DNA, 23 bp, Homo sapiens
taaaagaaacaggccaacggcat

SEQ ID NO: 2858 - DNA, 23 bp, Homo sapiens
aactaccgtcgggttacctcctc

SEQ ID NO: 2859 - DNA, 25 bp, Homo sapiens
tggtataaagtaatcaacgtgttgg

SEQ ID NO: 2860 - DNA, 25 bp, Homo sapiens
tgtcgatgtaggaagaggtagttaa

SEQ ID NO: 2861 - DNA, 24 bp, Homo sapiens
tccatacaggcttgactcgtcggt

SEQ ID NO: 2862 - DNA, 25 bp, Homo sapiens
ggcaggttctccaagtggtataggt

SEQ ID NO: 2863 - DNA, 25 bp, Homo sapiens
acggcatgtagtattggacgaaggt

SEQ ID NO: 2864 - DNA, 25 bp, Homo sapiens
aggttcaactaggtgttatcgtgga

SEQ ID NO: 2865 - DNA, 25 bp, Homo sapiens
gggtgtaatttccgcagtaaggtaa

SEQ ID NO: 2866 - DNA, 25 bp, Homo sapiens
acggcatgtagtattggacgaaggt

SEQ ID NO: 2867 - DNA, 25 bp, Homo sapiens
aggttcaactaggtgttatcgtgga

SEQ ID NO: 2868 - DNA, 24 bp, Homo sapiens
tccatacaggcttgactcgtcggt

SEQ ID NO: 2869 - DNA, 25 bp, Homo sapiens
aggttcaactaggtgttatcgtgga

SEQ ID NO: 2870 - DNA, 24 bp, Homo sapiens
tccatacaggcttgactcgtcggt

SEQ ID NO: 2871 - DNA, 25 bp, Homo sapiens
ccgcagtaaggtaagactaggtagt

SEQ ID NO: 2872 - DNA, 24 bp, Homo sapiens
ttgtctggtaggttgaagtcacta

SEQ ID NO: 2873 - DNA, 25 bp, Homo sapiens
agaaggagaccacgaagaagacatc

SEQ ID NO: 2874 - DNA, 25 bp, Homo sapiens
aaccaccgaggacaaaccactgaag

SEQ ID NO: 2875 - DNA, 24 bp, Homo sapiens
gtcggttagttgtgcggtccttct

SEQ ID NO: 2876 - DNA, 24 bp, Homo sapiens
agataaaaactcaaccagacgagt

SEQ ID NO: 2877 - DNA, 24 bp, Homo sapiens
gataaaaactcaaccagacgagta

SEQ ID NO: 2878 - DNA, 24 bp, Homo sapiens
gagataaaaactcaaccagacgag

SEQ ID NO: 2879 - DNA, 23 bp, Homo sapiens
gacacgacagcgaagtcaaagac

SEQ ID NO: 2880 - DNA, 25 bp, Homo sapiens
agtccaccgttacgataaccaccac

SEQ ID NO: 2881 - DNA, 25 bp, Homo sapiens
agaaggagaccacgaagaagacatc

SEQ ID NO: 2882 - DNA, 23 bp, Homo sapiens
tggtgaccgaggagtccgagcag

SEQ ID NO: 2883 - DNA, 23 bp, Homo sapiens
atagcgacgacgacagcgaccta

SEQ ID NO: 2884 - DNA, 24 bp, Homo sapiens
cgagcgaggaggagtctcagtagt

SEQ ID NO: 2885 - DNA, 25 bp, Homo sapiens
cgtcaacctcttgtagttagcctgc

SEQ ID NO: 2886 - DNA, 23 bp, Homo sapiens
atagcgacgacgacagcgaccta

SEQ ID NO: 2887 - DNA, 24 bp, Homo sapiens
cgagcgaggaggagtctcagtagt

SEQ ID NO: 2888 - DNA, 25 bp, Homo sapiens
caggttgcttctcacttgacgttgc

SEQ ID NO: 2889 - DNA, 25 bp, Homo sapiens
tcctcggcatctaaatagtaaccag

SEQ ID NO: 2890 - DNA, 25 bp, Homo sapiens
agacttaaagatcaccgttctccaa

SEQ ID NO: 2891 - DNA, 24 bp, Homo sapiens
ctagacgtaagaaccgaaatctat

SEQ ID NO: 2892 - DNA, 25 bp, Homo sapiens
cgacacagaagtgaaagacaggtgc

SEQ ID NO: 2893 - DNA, 25 bp, Homo sapiens
agtgcaagctacatccgttctgaga

SEQ ID NO: 2894 - DNA, 25 bp, Homo sapiens
tagacagccacgaacaacttacggt

SEQ ID NO: 2895 - DNA, 25 bp, Homo sapiens
aagacggtcattgaagacaaggcac

SEQ ID NO: 2896 - DNA, 25 bp, Homo sapiens
cccgttagaccaggtaggaaaggac

SEQ ID NO: 2897 - DNA, 23 bp, Homo sapiens
ggaccgcgtcgaaaagccttaga

SEQ ID NO: 2898 - DNA, 25 bp, Homo sapiens
catcgttatgaccagacttgtcgga

SEQ ID NO: 2899 - DNA, 25 bp, Homo sapiens
cgctataagccttacgtcggaagaa

SEQ ID NO: 2900 - DNA, 25 bp, Homo sapiens
agatccacgtcaaacatacgatacg

SEQ ID NO: 2901 - DNA, 23 bp, Homo sapiens
ggtcaggtgctccaactactcgg

SEQ ID NO: 2902 - DNA, 25 bp, Homo sapiens
aaggacgagagactaaacaccaagt

SEQ ID NO: 2903 - DNA, 25 bp, Homo sapiens
aaggagactcggagaaggaactcaa

SEQ ID NO: 2904 - DNA, 25 bp, Homo sapiens
cggacgcaatgaagagaacagaagt

SEQ ID NO: 2905 - DNA, 25 bp, Homo sapiens
tctgtcgttccaggtcctactagac

SEQ ID NO: 2906 - DNA, 24 bp, Homo sapiens
cgtctactggtttactgggcaaca

SEQ ID NO: 2907 - DNA, 23 bp, Homo sapiens
aacttacgagcgactggtggaca

SEQ ID NO: 2908 - DNA, 25 bp, Homo sapiens
acaaggagacacagaccacggacat

SEQ ID NO: 2909 - DNA, 25 bp, Homo sapiens
aaacccgagtaagtgtaaatcccga

SEQ ID NO: 2910 - DNA, 25 bp, Homo sapiens
tctgtcgttccaggtcctactagac

SEQ ID NO: 2911 - DNA, 25 bp, Homo sapiens
acccgagtaagtgtaaatcccgaaa

SEQ ID NO: 2912 - DNA, 25 bp, Homo sapiens
tctgtcgttccaggtcctactagac

SEQ ID NO: 2913 - DNA, 25 bp, Homo sapiens
actggtttactgggcaacagactct

SEQ ID NO: 2914 - DNA, 25 bp, Homo sapiens
acctcgtggactacaagttaatccg

SEQ ID NO: 2915 - DNA, 25 bp, Homo sapiens
tgatatacgaaggagtgtctacggt

SEQ ID NO: 2916 - DNA, 24 bp, Homo sapiens
agtgtgactattccgacgagaaca

SEQ ID NO: 2917 - DNA, 25 bp, Homo sapiens
cactggtccgaagcatgaagaagaa

SEQ ID NO: 2918 - DNA, 24 bp, Homo sapiens
gaagaagttcgaccaggtacacta

SEQ ID NO: 2919 - DNA, 25 bp, Homo sapiens
agagtgtcagtcagagtcctgtgag

SEQ ID NO: 2920 - DNA, 25 bp, Homo sapiens
caacactacagtattaccacaacgg

SEQ ID NO: 2921 - DNA, 25 bp, Homo sapiens
actaccctcgtaatactaccagagt

SEQ ID NO: 2922 - DNA, 23 bp, Homo sapiens
cccaagcccaaagagacgaaccc

SEQ ID NO: 2923 - DNA, 24 bp, Homo sapiens
cggctataaagggactttcttttc

SEQ ID NO: 2924 - DNA, 24 bp, Homo sapiens
ggctataaagggactttcttttct

SEQ ID NO: 2925 - DNA, 24 bp, Homo sapiens
tcggctataaagggactttctttt

SEQ ID NO: 2926 - DNA, 25 bp, Homo sapiens
gacgacgagcgtgaagaaaacgaag

SEQ ID NO: 2927 - DNA, 25 bp, Homo sapiens
ctcagaacctactctatagcttcgc

SEQ ID NO: 2928 - DNA, 25 bp, Homo sapiens
tgaaagttaaaatcgtggaagacct

SEQ ID NO: 2929 - DNA, 24 bp, Homo sapiens
ctaaaggtcgtggattttctaatt

SEQ ID NO: 2930 - DNA, 24 bp, Homo sapiens
taaaggtcgtggattttctaattt

SEQ ID NO: 2931 - DNA, 24 bp, Homo sapiens
tctaaaggtcgtggattttctaat

SEQ ID NO: 2932 - DNA, 25 bp, Homo sapiens
aggcattacgaccaaaagacagagt

SEQ ID NO: 2933 - DNA, 24 bp, Homo sapiens
gaaaggcaaaattactacggagta

SEQ ID NO: 2934 - DNA, 24 bp, Homo sapiens
aaaaagacatcgaaaggttaaaaa

SEQ ID NO: 2935 - DNA, 24 bp, Homo sapiens
aaagaagtcgaaccaaaaagtaca

SEQ ID NO: 2936 - DNA, 25 bp, Homo sapiens
tatgtactcagtgtccgactcgtca

SEQ ID NO: 2937 - DNA, 25 bp, Homo sapiens
gcacatagacagtcaagtaagcagg

SEQ ID NO: 2938 - DNA, 25 bp, Homo sapiens
tcactctcctgcgactacttcttgt

SEQ ID NO: 2939 - DNA, 25 bp, Homo sapiens
acctgttcatcttgagaaacctccc

SEQ ID NO: 2940 - DNA, 25 bp, Homo sapiens
tatgtactcagtgtccgactcgtca

SEQ ID NO: 2941 - DNA, 25 bp, Homo sapiens
gggtgtgtcaataagtgggttcctg

SEQ ID NO: 2942 - DNA, 25 bp, Homo sapiens
tatgtactcagtgtccgactcgtca

SEQ ID NO: 2943 - DNA, 25 bp, Homo sapiens
gggtgtgtcaataagtgggttcctg

SEQ ID NO: 2944 - DNA, 25 bp, Homo sapiens
gcacatagacagtcaagtaagcagg

SEQ ID NO: 2945 - DNA, 25 bp, Homo sapiens
taaagaacaacagaaagaaccgact

SEQ ID NO: 2946 - DNA, 25 bp, Homo sapiens
tatgtactcagtgtccgactcgtca

SEQ ID NO: 2947 - DNA, 25 bp, Homo sapiens
gggtgtgtcaataagtgggttcctg

SEQ ID NO: 2948 - DNA, 25 bp, Homo sapiens
gggtgtgtcaataagtgggttcctg

SEQ ID NO: 2949 - DNA, 25 bp, Homo sapiens
gcacatagacagtcaagtaagcagg

SEQ ID NO: 2950 - DNA, 25 bp, Homo sapiens
tcactctcctgcgactacttcttgt

SEQ ID NO: 2951 - DNA, 25 bp, Homo sapiens
gcacatagacagtcaagtaagcagg

SEQ ID NO: 2952 - DNA, 25 bp, Homo sapiens
tcactctcctgcgactacttcttgt

SEQ ID NO: 2953 - DNA, 23 bp, Homo sapiens
aaggttgatcggtcgtcaccatc

SEQ ID NO: 2954 - DNA, 25 bp, Homo sapiens
actctaagtgacaggttgttcgcca

SEQ ID NO: 2955 - DNA, 25 bp, Homo sapiens
tgtggactaaactgctacggaagaa

SEQ ID NO: 2956 - DNA, 25 bp, Homo sapiens
gacgagacctcatcacgaagacact

SEQ ID NO: 2957 - DNA, 23 bp, Homo sapiens
accacgtcttattccagcaaggc

SEQ ID NO: 2958 - DNA, 24 bp, Homo sapiens
ccagaggtgagtctcggaccatca

SEQ ID NO: 2959 - DNA, 23 bp, Homo sapiens
gttcggtcgggttctcatcgtcc

SEQ ID NO: 2960 - DNA, 24 bp, Homo sapiens
attgttggagttgtcacaggcgtc

SEQ ID NO: 2961 - DNA, 24 bp, Homo sapiens
agactaagtcgtaccacccgtaga

SEQ ID NO: 2962 - DNA, 24 bp, Homo sapiens
gtcgtcgggtagaacagtgaacaa

SEQ ID NO: 2963 - DNA, 24 bp, Homo sapiens
taagaggtcgcaggtcatcgtcca

SEQ ID NO: 2964 - DNA, 25 bp, Homo sapiens
aattggtcaaggtccgtggtcatcg

SEQ ID NO: 2965 - DNA, 25 bp, Homo sapiens
ggtattactacacttcttcctgtgg

SEQ ID NO: 2966 - DNA, 25 bp, Homo sapiens
aattggtcaaggtccgtggtcatcg

SEQ ID NO: 2967 - DNA, 25 bp, Homo sapiens
acacataaggtcgtttcttgttcgg

SEQ ID NO: 2968 - DNA, 25 bp, Homo sapiens
taagacgattatggcaagctgtagc

SEQ ID NO: 2969 - DNA, 23 bp, Homo sapiens
cctttggtggcgtccttagtccc

SEQ ID NO: 2970 - DNA, 24 bp, Homo sapiens
taagaggtcgcaggtcatcgtcca

SEQ ID NO: 2971 - DNA, 25 bp, Homo sapiens
aattggtcaaggtccgtggtcatcg

SEQ ID NO: 2972 - DNA, 24 bp, Homo sapiens
ggaaggaaaattgaacttccggtt

SEQ ID NO: 2973 - DNA, 24 bp, Homo sapiens
taatttgtgatcggtagcccttat

SEQ ID NO: 2974 - DNA, 24 bp, Homo sapiens
tctaatttccctcggacctttgga

SEQ ID NO: 2975 - DNA, 24 bp, Homo sapiens
ttgagtaacttgaagtaagaactt

SEQ ID NO: 2976 - DNA, 24 bp, Homo sapiens
agtagtgtctttgtaaaaggtgga

SEQ ID NO: 2977 - DNA, 25 bp, Homo sapiens
agagaaaagaacgtgtctaacttgt

SEQ ID NO: 2978 - DNA, 23 bp, Homo sapiens
ccgggcctacatcgttaaacaaa

SEQ ID NO: 2979 - DNA, 25 bp, Homo sapiens
cactgtttgccttgagatgagccga

SEQ ID NO: 2980 - DNA, 25 bp, Homo sapiens
gtgtcggtcgcagaaatatgggagc

SEQ ID NO: 2981 - DNA, 25 bp, Homo sapiens
ttcttctgaagtaggttgttcgaga

SEQ ID NO: 2982 - DNA, 24 bp, Homo sapiens
tttccatgagtggtaggtacagtt

SEQ ID NO: 2983 - DNA, 24 bp, Homo sapiens
ttccatgagtggtaggtacagttg

SEQ ID NO: 2984 - DNA, 24 bp, Homo sapiens
ctttccatgagtggtaggtacagt

SEQ ID NO: 2985 - DNA, 24 bp, Homo sapiens
caccagaactcggatctttttatt

SEQ ID NO: 2986 - DNA, 24 bp, Homo sapiens
accagaactcggatctttttatta

SEQ ID NO: 2987 - DNA, 24 bp, Homo sapiens
ccaccagaactcggatctttttat

SEQ ID NO: 2988 - DNA, 24 bp, Homo sapiens
taccgtaagtgagacttcaaactg

SEQ ID NO: 2989 - DNA, 24 bp, Homo sapiens
accgtaagtgagacttcaaactgt

SEQ ID NO: 2990 - DNA, 24 bp, Homo sapiens
ctaccgtaagtgagacttcaaact

SEQ ID NO: 2991 - DNA, 25 bp, Homo sapiens
aagtagaaccggaagtccaccaagt

SEQ ID NO: 2992 - DNA, 25 bp, Homo sapiens
cgttcatagacctaccgtaagtgag

SEQ ID NO: 2993 - DNA, 25 bp, Homo sapiens
gtcttctgtacgtcgtggtagttca

SEQ ID NO: 2994 - DNA, 25 bp, Homo sapiens
cgttcaggtaaatcgagttccgtct

SEQ ID NO: 2995 - DNA, 25 bp, Homo sapiens
cgttcatagacctaccgtaagtgag

SEQ ID NO: 2996 - DNA, 24 bp, Homo sapiens
ttaggtaacaagtcaacgacagta

SEQ ID NO: 2997 - DNA, 23 bp, Homo sapiens
aacagttataacctcgttagacg

SEQ ID NO: 2998 - DNA, 25 bp, Homo sapiens
aagtagaaccggaagtccaccaagt

SEQ ID NO: 2999 - DNA, 25 bp, Homo sapiens
cgttcatagacctaccgtaagtgag

SEQ ID NO: 3000 - DNA, 24 bp, Homo sapiens
ttaggtaacaagtcaacgacagta

SEQ ID NO: 3001 - DNA, 25 bp, Homo sapiens
gtcttctgtacgtcgtggtagttca

SEQ ID NO: 3002 - DNA, 25 bp, Homo sapiens
cgttcatagacctaccgtaagtgag

SEQ ID NO: 3003 - DNA, 23 bp, Homo sapiens
taggtaacaagtcaacgacagta

SEQ ID NO: 3004 - DNA, 25 bp, Homo sapiens
gtcttctgtacgtcgtggtagttca

SEQ ID NO: 3005 - DNA, 24 bp, Homo sapiens
agtagtaggagactcaggagaagt

SEQ ID NO: 3006 - DNA, 25 bp, Homo sapiens
cagtaagtagagcaggtacaggacg

SEQ ID NO: 3007 - DNA, 25 bp, Homo sapiens
tggagtaactggagaggtagtaggc

SEQ ID NO: 3008 - DNA, 24 bp, Homo sapiens
acaagttatgtaagtcctccagct

SEQ ID NO: 3009 - DNA, 24 bp, Homo sapiens
caagttatgtaagtcctccagctc

SEQ ID NO: 3010 - DNA, 24 bp, Homo sapiens
aacaagttatgtaagtcctccagc

SEQ ID NO: 3011 - DNA, 24 bp, Homo sapiens
tcctgtccgaagttaagacgacga

SEQ ID NO: 3012 - DNA, 24 bp, Homo sapiens
tctttaggacagtgaacgctttcg

SEQ ID NO: 3013 - DNA, 24 bp, Homo sapiens
tccagctcacagaccaggttctag

SEQ ID NO: 3014 - DNA, 24 bp, Homo sapiens
caggttgttgtctcgttccgtatt

SEQ ID NO: 3015 - DNA, 24 bp, Homo sapiens
aagatcgttagtggactcacggaa

SEQ ID NO: 3016 - DNA, 24 bp, Homo sapiens
ggtaggtctgaagacgttccgctt

SEQ ID NO: 3017 - DNA, 24 bp, Homo sapiens
ctttaccctagagtctccatgctt

SEQ ID NO: 3018 - DNA, 24 bp, Homo sapiens
tttaccctagagtctccatgctta

SEQ ID NO: 3019 - DNA, 24 bp, Homo sapiens
actttaccctagagtctccatgct

SEQ ID NO: 3020 - DNA, 23 bp, Homo sapiens
gtagtagtagacgttcctcgacc

SEQ ID NO: 3021 - DNA, 25 bp, Homo sapiens
acatcgttgaaactaaagggaccca

SEQ ID NO: 3022 - DNA, 25 bp, Homo sapiens
ctagagtctccatgcttaccgtagg

SEQ ID NO: 3023 - DNA, 25 bp, Homo sapiens
ctagagtctccatgcttaccgtagg

SEQ ID NO: 3024 - DNA, 23 bp, Homo sapiens
gtctaggtcgtccatcctcgcct

SEQ ID NO: 3025 - DNA, 25 bp, Homo sapiens
cggaggactatcgcatccatgagta

SEQ ID NO: 3026 - DNA, 23 bp, Homo sapiens
acttgggacctctcagcttatag

SEQ ID NO: 3027 - DNA, 24 bp, Homo sapiens
cgttcctcgaccccgagtatgaac

SEQ ID NO: 3028 - DNA, 23 bp, Homo sapiens
ggtcaacatcatcagatcgtagt

SEQ ID NO: 3029 - DNA, 25 bp, Homo sapiens
ggacttgggacctctcagcttatag

SEQ ID NO: 3030 - DNA, 23 bp, Homo sapiens
gtagtagtagacgttcctcgacc

SEQ ID NO: 3031 - DNA, 25 bp, Homo sapiens
acatcgttgaaactaaagggaccca

SEQ ID NO: 3032 - DNA, 25 bp, Homo sapiens
ggacttgggacctctcagcttatag

SEQ ID NO: 3033 - DNA, 23 bp, Homo sapiens
gtagtagtagacgttcctcgacc

SEQ ID NO: 3034 - DNA, 25 bp, Homo sapiens
cgttgaaactaaagggacccaaagg

SEQ ID NO: 3035 - DNA, 23 bp, Homo sapiens
gactgaccactacagcgactctc

SEQ ID NO: 3036 - DNA, 23 bp, Homo sapiens
gagtcccctgactcaatccagaa

SEQ ID NO: 3037 - DNA, 25 bp, Homo sapiens
ccatacagtggacctaccaacaacc

SEQ ID NO: 3038 - DNA, 23 bp, Homo sapiens
aagaacgggtaattccttgcccc

SEQ ID NO: 3039 - DNA, 23 bp, Homo sapiens
aagcgtctaggtcgtccatcctc

SEQ ID NO: 3040 - DNA, 25 bp, Homo sapiens
ttcccatagttactcacgaaacgca

SEQ ID NO: 3041 - DNA, 23 bp, Homo sapiens
gtagtagtagacgttcctcgacc

SEQ ID NO: 3042 - DNA, 25 bp, Homo sapiens
cgttgaaactaaagggacccaaagg

SEQ ID NO: 3043 - DNA, 25 bp, Homo sapiens
ggtctcgaaagtaggatatgtctat

SEQ ID NO: 3044 - DNA, 24 bp, Homo sapiens
cggtagtggtcgtgctgtaagtgg

SEQ ID NO: 3045 - DNA, 25 bp, Homo sapiens
acatcatcagatcgtagtagtagac

SEQ ID NO: 3046 - DNA, 23 bp, Homo sapiens
acatcgttgaaactaaagggacc

SEQ ID NO: 3047 - DNA, 25 bp, Homo sapiens
tcagcaacagtttgtccttccacga

SEQ ID NO: 3048 - DNA, 25 bp, Homo sapiens
tgttatctgtacggaaggatcttgt

SEQ ID NO: 3049 - DNA, 25 bp, Homo sapiens
cgagaaaggtgtttgtatgttaccc

SEQ ID NO: 3050 - DNA, 25 bp, Homo sapiens
aggtaagtctgaggttagaggagtg

SEQ ID NO: 3051 - DNA, 24 bp, Homo sapiens
acaacgacccagcaggaaaaatga

SEQ ID NO: 3052 - DNA, 25 bp, Homo sapiens
accgaagtgactagaggaaacgatg

SEQ ID NO: 3053 - DNA, 25 bp, Homo sapiens
gctccatctaaaacaccgttgtagg

SEQ ID NO: 3054 - DNA, 25 bp, Homo sapiens
tctgtaacacgagtttagacgttaa

SEQ ID NO: 3055 - DNA, 24 bp, Homo sapiens
tcatggttctgactgtgtaagtga

SEQ ID NO: 3056 - DNA, 25 bp, Homo sapiens
ggcagaatgactaccttccagttca

SEQ ID NO: 3057 - DNA, 25 bp, Homo sapiens
agacggagagcagaactcacctgta

SEQ ID NO: 3058 - DNA, 25 bp, Homo sapiens
aggttgttactgtgtcgtataagtc

SEQ ID NO: 3059 - DNA, 25 bp, Homo sapiens
gctccatctaaaacaccgttgtagg

SEQ ID NO: 3060 - DNA, 25 bp, Homo sapiens
tctgtaacacgagtttagacgttaa

SEQ ID NO: 3061 - DNA, 25 bp, Homo sapiens
gacacaattaatccaagaagtctca

SEQ ID NO: 3062 - DNA, 24 bp, Homo sapiens
ccattgtagaaggacctcaggacg

SEQ ID NO: 3063 - DNA, 24 bp, Homo sapiens
cattgtagaaggacctcaggacga

SEQ ID NO: 3064 - DNA, 24 bp, Homo sapiens
gccattgtagaaggacctcaggac

SEQ ID NO: 3065 - DNA, 25 bp, Homo sapiens
tctaggagacgatgtagtctgtacg

SEQ ID NO: 3066 - DNA, 24 bp, Homo sapiens
tctcttcagactgtcttcgtagaa

SEQ ID NO: 3067 - DNA, 25 bp, Homo sapiens
gtgaccaggagtccactctaagacc

SEQ ID NO: 3068 - DNA, 24 bp, Homo sapiens
ctttacgaaaccacgtccacggtg

SEQ ID NO: 3069 - DNA, 25 bp, Homo sapiens
aggcaacaactgagtctacggagtc

SEQ ID NO: 3070 - DNA, 24 bp, Homo sapiens
acgacggtggtggacactgtccct

SEQ ID NO: 3071 - DNA, 24 bp, Homo sapiens
cgacggtggtggacactgtccctt

SEQ ID NO: 3072 - DNA, 24 bp, Homo sapiens
aacgacggtggtggacactgtccc

SEQ ID NO: 3073 - DNA, 25 bp, Homo sapiens
gtaatacttctcaacgacctcaccg

SEQ ID NO: 3074 - DNA, 25 bp, Homo sapiens
aactgcttggtgtagtcttcggaga

SEQ ID NO: 3075 - DNA, 25 bp, Homo sapiens
tagtgtccgttacagagtcctcacc

SEQ ID NO: 3076 - DNA, 23 bp, Homo sapiens
tctcgaaatcgcagccgttcacg

SEQ ID NO: 3077 - DNA, 24 bp, Homo sapiens
cgtagcagtactagagaattagaa

SEQ ID NO: 3078 - DNA, 24 bp, Homo sapiens
cgacaccaaacgagttagtctcta

SEQ ID NO: 3079 - DNA, 25 bp, Homo sapiens
gacgacggtaaagtcaatagaccag

SEQ ID NO: 3080 - DNA, 25 bp, Homo sapiens
ggacaacgagcagttaaagttaccg

SEQ ID NO: 3081 - DNA, 24 bp, Homo sapiens
gaagtaacgagttctcctgtagta

SEQ ID NO: 3082 - DNA, 25 bp, Homo sapiens
ctacctctgtaagaagaaccgtcgt

SEQ ID NO: 3083 - DNA, 24 bp, Homo sapiens
tcctcctcgggtgagtatccattg

SEQ ID NO: 3084 - DNA, 25 bp, Homo sapiens
cgaactttgagggtacaggtttccg

SEQ ID NO: 3085 - DNA, 25 bp, Homo sapiens
tgatggttacataactaccgaaggt

SEQ ID NO: 3086 - DNA, 25 bp, Homo sapiens
tccgtgagactacctataagacaga

SEQ ID NO: 3087 - DNA, 24 bp, Homo sapiens
cctttttaaatggacaccgtgtag

SEQ ID NO: 3088 - DNA, 24 bp, Homo sapiens
ctttttaaatggacaccgtgtagt

SEQ ID NO: 3089 - DNA, 24 bp, Homo sapiens
acctttttaaatggacaccgtgta

SEQ ID NO: 3090 - DNA, 24 bp, Homo sapiens
cccggacgtatgttagaagtagcc

SEQ ID NO: 3091 - DNA, 24 bp, Homo sapiens
ccggacgtatgttagaagtagccg

SEQ ID NO: 3092 - DNA, 24 bp, Homo sapiens
acccggacgtatgttagaagtagc

SEQ ID NO: 3093 - DNA, 25 bp, Homo sapiens
ttctcagacgaacctctcacactaa

SEQ ID NO: 3094 - DNA, 25 bp, Homo sapiens
actaaatcctgaagcctcaaaatgt

SEQ ID NO: 3095 - DNA, 25 bp, Homo sapiens
acgctatcatatagtgttcgacgaa

SEQ ID NO: 3096 - DNA, 25 bp, Homo sapiens
gctcgtcaactttattcaggttcac

SEQ ID NO: 3097 - DNA, 25 bp, Homo sapiens
ttcgcttctgtccctaaacctcaaa

SEQ ID NO: 3098 - DNA, 24 bp, Homo sapiens
cgaaccacctgacgtaccattaca

SEQ ID NO: 3099 - DNA, 25 bp, Homo sapiens
ttacgggaacaatcaatttagcacg

SEQ ID NO: 3100 - DNA, 25 bp, Homo sapiens
gtcttctttgtccgaatcaggtccc

SEQ ID NO: 3101 - DNA, 24 bp, Homo sapiens
tcgtaggagagagacacgtaacac

SEQ ID NO: 3102 - DNA, 24 bp, Homo sapiens
cgtaggagagagacacgtaacaca

SEQ ID NO: 3103 - DNA, 24 bp, Homo sapiens
ttcgtaggagagagacacgtaaca

SEQ ID NO: 3104 - DNA, 24 bp, Homo sapiens
acgctttacagtgttgtgtagacc

SEQ ID NO: 3105 - DNA, 24 bp, Homo sapiens
cgctttacagtgttgtgtagacca

SEQ ID NO: 3106 - DNA, 24 bp, Homo sapiens
tacgctttacagtgttgtgtagac

SEQ ID NO: 3107 - DNA, 23 bp, Homo sapiens
agtcatcttttcttcatcgtcga

SEQ ID NO: 3108 - DNA, 25 bp, Homo sapiens
caagaaatttgaattgcgggtcctt

SEQ ID NO: 3109 - DNA, 23 bp, Homo sapiens
ctattggtggtccactcgggggt

SEQ ID NO: 3110 - DNA, 25 bp, Homo sapiens
agggtcgttgtcaggtattcttgta

SEQ ID NO: 3111 - DNA, 25 bp, Homo sapiens
agaccactactttgtccgtgactct

SEQ ID NO: 3112 - DNA, 25 bp, Homo sapiens
gtccaaactttctacgctttacagt

SEQ ID NO: 3113 - DNA, 24 bp, Homo sapiens
ggtcgttgtcaggtattcttgtaa

SEQ ID NO: 3114 - DNA, 23 bp, Homo sapiens
ttgtccgtgactctttatcctac

SEQ ID NO: 3115 - DNA, 25 bp, Homo sapiens
acctgttgttaagaactgacttgga

SEQ ID NO: 3116 - DNA, 25 bp, Homo sapiens
ttgcgggtcctttaccacagtcatc

SEQ ID NO: 3117 - DNA, 25 bp, Homo sapiens
ttaaggacgaggaggacactcaact

SEQ ID NO: 3118 - DNA, 25 bp, Homo sapiens
agaccactactttgtccgtgactct

SEQ ID NO: 3119 - DNA, 25 bp, Homo sapiens
acctgttgttaagaactgacttgga

SEQ ID NO: 3120 - DNA, 25 bp, Homo sapiens
ttgcgggtcctttaccacagtcatc

SEQ ID NO: 3121 - DNA, 25 bp, Homo sapiens
gttaggaagacggtcaacgaggtga

SEQ ID NO: 3122 - DNA, 24 bp, Homo sapiens
agacacactcaaggacctcccgaa

SEQ ID NO: 3123 - DNA, 25 bp, Homo sapiens
actttagagaacaaggtcacacaga

SEQ ID NO: 3124 - DNA, 25 bp, Homo sapiens
acgataaaggaaaccgcttagtagg

SEQ ID NO: 3125 - DNA, 25 bp, Homo sapiens
cgttacaatgttccagtaggttctg

SEQ ID NO: 3126 - DNA, 23 bp, Homo sapiens
tctatgagaggtgcgagaagtcc

SEQ ID NO: 3127 - DNA, 24 bp, Homo sapiens
gagagtcacgtaaaccgttcttga

SEQ ID NO: 3128 - DNA, 23 bp, Homo sapiens
aagtccccgtacctatactgctt

SEQ ID NO: 3129 - DNA, 25 bp, Homo sapiens
cgttcgtgtcttagatacactcttg

SEQ ID NO: 3130 - DNA, 24 bp, Homo sapiens
aacctttaagtggttgatgaggtc

SEQ ID NO: 3131 - DNA, 24 bp, Homo sapiens
acctttaagtggttgatgaggtcc

SEQ ID NO: 3132 - DNA, 24 bp, Homo sapiens
taacctttaagtggttgatgaggt

SEQ ID NO: 3133 - DNA, 24 bp, Homo sapiens
tgagtgcatccggacacctcgacg

SEQ ID NO: 3134 - DNA, 24 bp, Homo sapiens
gagtgcatccggacacctcgacgt

SEQ ID NO: 3135 - DNA, 24 bp, Homo sapiens
gtgagtgcatccggacacctcgac

SEQ ID NO: 3136 - DNA, 23 bp, Homo sapiens
gttgaggcgaagtagccgaagcg

SEQ ID NO: 3137 - DNA, 23 bp, Homo sapiens
gaagacgacgagccgccggtggt

SEQ ID NO: 3138 - DNA, 24 bp, Homo sapiens
tgtcaaacggtggaaggcgtacga

SEQ ID NO: 3139 - DNA, 24 bp, Homo sapiens
gtcaaacggtggaaggcgtacgac

SEQ ID NO: 3140 - DNA, 24 bp, Homo sapiens
gtgtcaaacggtggaaggcgtacg

SEQ ID NO: 3141 - DNA, 24 bp, Homo sapiens
cccttctgagtggtgtatgagtag

SEQ ID NO: 3142 - DNA, 24 bp, Homo sapiens
ccttctgagtggtgtatgagtagt

SEQ ID NO: 3143 - DNA, 24 bp, Homo sapiens
acccttctgagtggtgtatgagta

SEQ ID NO: 3144 - DNA, 25 bp, Homo sapiens
agttcttctggacgactttatgtgt

SEQ ID NO: 3145 - DNA, 25 bp, Homo sapiens
cccgaccaaacaaactgcattgacc

SEQ ID NO: 3146 - DNA, 25 bp, Homo sapiens
tctagttgcttacgatcactttacg

SEQ ID NO: 3147 - DNA, 24 bp, Homo sapiens
cgacgatatgagcacgagtcgacc

SEQ ID NO: 3148 - DNA, 24 bp, Homo sapiens
gacgatatgagcacgagtcgacct

SEQ ID NO: 3149 - DNA, 24 bp, Homo sapiens
acgacgatatgagcacgagtcgac

SEQ ID NO: 3150 - DNA, 25 bp, Homo sapiens
tgacttggcaagaagacatcgctga

SEQ ID NO: 3151 - DNA, 23 bp, Homo sapiens
ggtgatcctagtacagacgacgg

SEQ ID NO: 3152 - DNA, 25 bp, Homo sapiens
caattacgacgatatgagcacgagt

SEQ ID NO: 3153 - DNA, 23 bp, Homo sapiens
ggtgatcctagtacagacgacgg

SEQ ID NO: 3154 - DNA, 25 bp, Homo sapiens
caattacgacgatatgagcacgagt

SEQ ID NO: 3155 - DNA, 25 bp, Homo sapiens
aggtgaccaagatgaggttccgaga

SEQ ID NO: 3156 - DNA, 25 bp, Homo sapiens
cgtcagaggacacttagaggtcatt

SEQ ID NO: 3157 - DNA, 25 bp, Homo sapiens
tgacttggcaagaagacatcgctga

SEQ ID NO: 3158 - DNA, 23 bp, Homo sapiens
ggtgatcctagtacagacgacgg

SEQ ID NO: 3159 - DNA, 23 bp, Homo sapiens
tagctacttcagccggtcgtacc

SEQ ID NO: 3160 - DNA, 24 bp, Homo sapiens
tccaccaccgaagagtagtagtcc

SEQ ID NO: 3161 - DNA, 25 bp, Homo sapiens
aaggttcctagaagtgtacttattg

SEQ ID NO: 3162 - DNA, 25 bp, Homo sapiens
aaggttagacaaagtggaagtagtt

SEQ ID NO: 3163 - DNA, 23 bp, Homo sapiens
gtcctagtaagcgtaactatcgt

SEQ ID NO: 3164 - DNA, 23 bp, Homo sapiens
ccagcaacctcatactccattcg

SEQ ID NO: 3165 - DNA, 25 bp, Homo sapiens
tacgaccaccaacactactgtctcc

SEQ ID NO: 3166 - DNA, 25 bp, Homo sapiens
taccaccagattgaagacgcaagaa

SEQ ID NO: 3167 - DNA, 24 bp, Homo sapiens
tgtgatgtttgacgccgtggtgcg

SEQ ID NO: 3168 - DNA, 24 bp, Homo sapiens
gtgatgtttgacgccgtggtgcgc

SEQ ID NO: 3169 - DNA, 24 bp, Homo sapiens
ttgtgatgtttgacgccgtggtgc

SEQ ID NO: 3170 - DNA, 25 bp, Homo sapiens
acgagtagtctttgacagttacaga

SEQ ID NO: 3171 - DNA, 24 bp, Homo sapiens
ggtgtacttatgcgaggtgtcaga

SEQ ID NO: 3172 - DNA, 24 bp, Homo sapiens
gtgtaaaagaggagactggtgttt

SEQ ID NO: 3173 - DNA, 24 bp, Homo sapiens
ctattctaggtccccgaggagatg

SEQ ID NO: 3174 - DNA, 25 bp, Homo sapiens
agtgtatttaagcgagtagatccga

SEQ ID NO: 3175 - DNA, 23 bp, Homo sapiens
gtgttaggccccactacctaaga

SEQ ID NO: 3176 - DNA, 24 bp, Homo sapiens
tccttcttctagtcagccatctac

SEQ ID NO: 3177 - DNA, 24 bp, Homo sapiens
tcttcatcaccactacggaggcga

SEQ ID NO: 3178 - DNA, 25 bp, Homo sapiens
ccgatatggtggatgtgagagttga

SEQ ID NO: 3179 - DNA, 23 bp, Homo sapiens
cgacatagtcctccaagcacgaa

SEQ ID NO: 3180 - DNA, 24 bp, Homo sapiens
ctgagctccgtggcaagaacgagg

SEQ ID NO: 3181 - DNA, 24 bp, Homo sapiens
tgagctccgtggcaagaacgaggg

SEQ ID NO: 3182 - DNA, 24 bp, Homo sapiens
tctgagctccgtggcaagaacgag

SEQ ID NO: 3183 - DNA, 24 bp, Homo sapiens
caccttccacaagacctcttcttt

SEQ ID NO: 3184 - DNA, 24 bp, Homo sapiens
accttccacaagacctcttctttt

SEQ ID NO: 3185 - DNA, 24 bp, Homo sapiens
ccaccttccacaagacctcttctt

SEQ ID NO: 3186 - DNA, 24 bp, Homo sapiens
tttctgagtgagtaaaaggaaggc

SEQ ID NO: 3187 - DNA, 24 bp, Homo sapiens
aggtgatttagaagccgttgtagt

SEQ ID NO: 3188 - DNA, 24 bp, Homo sapiens
agaaacgcttttgctttgaaagag

SEQ ID NO: 3189 - DNA, 24 bp, Homo sapiens
aggtgatttagaagccgttgtagt

SEQ ID NO: 3190 - DNA, 24 bp, Homo sapiens
aacgcttttgctttgaaagagtcg

SEQ ID NO: 3191 - DNA, 24 bp, Homo sapiens
aagccgcgagttgcacgtcgggta

SEQ ID NO: 3192 - DNA, 24 bp, Homo sapiens
tagtagaacgaagcgaggtgacgg

SEQ ID NO: 3193 - DNA, 24 bp, Homo sapiens
aaaaggggcaggagggcattcaac

SEQ ID NO: 3194 - DNA, 24 bp, Homo sapiens
aactgagaaaaggacacggttttt

SEQ ID NO: 3195 - DNA, 24 bp, Homo sapiens
actgagaaaaggacacggttttta

SEQ ID NO: 3196 - DNA, 24 bp, Homo sapiens
taactgagaaaaggacacggtttt

SEQ ID NO: 3197 - DNA, 24 bp, Homo sapiens
gtcgtattacttggtaccgggctc

SEQ ID NO: 3198 - DNA, 24 bp, Homo sapiens
tcgtattacttggtaccgggctcc

SEQ ID NO: 3199 - DNA, 24 bp, Homo sapiens
agtcgtattacttggtaccgggct

SEQ ID NO: 3200 - DNA, 25 bp, Homo sapiens
cgacgatggacgagaagttactgta

SEQ ID NO: 3201 - DNA, 23 bp, Homo sapiens
gtaggttgaacattcgacggacg

SEQ ID NO: 3202 - DNA, 25 bp, Homo sapiens
gtgttaagtagtcggagtcctaagt

SEQ ID NO: 3203 - DNA, 23 bp, Homo sapiens
cgtctgctgccgtcggtaatgaa

SEQ ID NO: 3204 - DNA, 25 bp, Homo sapiens
cgaagggacctagaaccaaaggagc

SEQ ID NO: 3205 - DNA, 23 bp, Homo sapiens
gcgtaaagagactccgtggtcga

SEQ ID NO: 3206 - DNA, 24 bp, Homo sapiens
gcgatagccgtgccgttctttctt

SEQ ID NO: 3207 - DNA, 24 bp, Homo sapiens
ccacgaacggtgtgaagaatgtct

SEQ ID NO: 3208 - DNA, 24 bp, Homo sapiens
agttgcgtgagttcggaatcgtgt

SEQ ID NO: 3209 - DNA, 24 bp, Homo sapiens
ccgctaattcgacccacccttctg

SEQ ID NO: 3210 - DNA, 24 bp, Homo sapiens
ataaggactatgagtctgccgaac

SEQ ID NO: 3211 - DNA, 24 bp, Homo sapiens
taaggactatgagtctgccgaaca

SEQ ID NO: 3212 - DNA, 24 bp, Homo sapiens
tataaggactatgagtctgccgaa

SEQ ID NO: 3213 - DNA, 24 bp, Homo sapiens
acacagtagaccttagaccgatct

SEQ ID NO: 3214 - DNA, 24 bp, Homo sapiens
tgggtgcttctgaagaggtgtgtg

SEQ ID NO: 3215 - DNA, 24 bp, Homo sapiens
cacacgtcacagtcgagattacac

SEQ ID NO: 3216 - DNA, 25 bp, Homo sapiens
agtcatcgacctccatattgttagg

SEQ ID NO: 3217 - DNA, 25 bp, Homo sapiens
ttaaagtcaacaccaacgaaaacgg

SEQ ID NO: 3218 - DNA, 25 bp, Homo sapiens
gacagaaacattgaccgagaccgca

SEQ ID NO: 3219 - DNA, 25 bp, Homo sapiens
aggtaggtcattaagtcaaagttcg

SEQ ID NO: 3220 - DNA, 25 bp, Homo sapiens
acaagtatacctctgttataatcga

SEQ ID NO: 3221 - DNA, 25 bp, Homo sapiens
aggtaggtcattaagtcaaagttcg

SEQ ID NO: 3222 - DNA, 25 bp, Homo sapiens
ttggtagagagcgtgagagaggtgt

SEQ ID NO: 3223 - DNA, 25 bp, Homo sapiens
aaaggtaggtcattaagtcaaagtt

SEQ ID NO: 3224 - DNA, 25 bp, Homo sapiens
tacaagtatacctctgttataatcg

SEQ ID NO: 3225 - DNA, 25 bp, Homo sapiens
tggacatcctgatacagagtaagta

SEQ ID NO: 3226 - DNA, 25 bp, Homo sapiens
acattagtctgaacagaatccgtga

SEQ ID NO: 3227 - DNA, 25 bp, Homo sapiens
cgcaaagagtccgtaaatggcatcg

SEQ ID NO: 3228 - DNA, 25 bp, Homo sapiens
aatgtcactacagaaggtattcaca

SEQ ID NO: 3229 - DNA, 24 bp, Homo sapiens
agtccactggtcccatcggtgtaa

SEQ ID NO: 3230 - DNA, 25 bp, Homo sapiens
cccagatgagcctcttttaacgccg

SEQ ID NO: 3231 - DNA, 25 bp, Homo sapiens
agtaagagaagtagcgatagaagtg

SEQ ID NO: 3232 - DNA, 24 bp, Homo sapiens
gtcggacgagactgtgacaggaac

SEQ ID NO: 3233 - DNA, 23 bp, Homo sapiens
agtccactggtcccatcggtgta

SEQ ID NO: 3234 - DNA, 25 bp, Homo sapiens
agtcaagaagtaagagaagtagcga

SEQ ID NO: 3235 - DNA, 25 bp, Homo sapiens
aagtaggtgaggaagacaaggcagt

SEQ ID NO: 3236 - DNA, 25 bp, Homo sapiens
agtgaccgaagaagtaaaggaggaa

SEQ ID NO: 3237 - DNA, 25 bp, Homo sapiens
tacgcttgttaccgcaggagaagta

SEQ ID NO: 3238 - DNA, 25 bp, Homo sapiens
taagttggtaacggaacaggtatga

SEQ ID NO: 3239 - DNA, 24 bp, Homo sapiens
gacagtcgaacttctggtgtaacg

SEQ ID NO: 3240 - DNA, 25 bp, Homo sapiens
aagtaggtgaggaagacaaggcagt

SEQ ID NO: 3241 - DNA, 24 bp, Homo sapiens
ttctacaaaggtttcggttccaga

SEQ ID NO: 3242 - DNA, 24 bp, Homo sapiens
aacgcaacacagaaactacgacgg

SEQ ID NO: 3243 - DNA, 24 bp, Homo sapiens
gacttgtagttctgtctggttcgt

SEQ ID NO: 3244 - DNA, 23 bp, Homo sapiens
gagtatgcagcggcctgtcgtag

SEQ ID NO: 3245 - DNA, 25 bp, Homo sapiens
tgttcagtgtttcaattcaccaggt

SEQ ID NO: 3246 - DNA, 25 bp, Homo sapiens
aaggtattacaaaaaggtcccagag

SEQ ID NO: 3247 - DNA, 25 bp, Homo sapiens
ttaatactttcatggagggtaagga

SEQ ID NO: 3248 - DNA, 25 bp, Homo sapiens
cgtattgaggtcgttcgagaagttc

SEQ ID NO: 3249 - DNA, 25 bp, Homo sapiens
tgatgtctctggacctgtagtcgtt

SEQ ID NO: 3250 - DNA, 25 bp, Homo sapiens
tccgttattcattccgtgtggaggt

SEQ ID NO: 3251 - DNA, 25 bp, Homo sapiens
tctctttgacgaaaatcttagacga

SEQ ID NO: 3252 - DNA, 23 bp, Homo sapiens
ctacgaatagttcaccatacttt

SEQ ID NO: 3253 - DNA, 25 bp, Homo sapiens
aagttctatcaagagaaactgtagt

SEQ ID NO: 3254 - DNA, 25 bp, Homo sapiens
atcagtagaccatctcctcttatgc

SEQ ID NO: 3255 - DNA, 25 bp, Homo sapiens
aacaggacggtagtcttcagtctcg

SEQ ID NO: 3256 - DNA, 24 bp, Homo sapiens
taatacgtgtcctagaccggctcc

SEQ ID NO: 3257 - DNA, 24 bp, Homo sapiens
aacgagaccaagtggcacagtatg

SEQ ID NO: 3258 - DNA, 23 bp, Homo sapiens
ttccagtaccagtccaaccacct

SEQ ID NO: 3259 - DNA, 23 bp, Homo sapiens
ggaccaacacctgtcaccagtcg

SEQ ID NO: 3260 - DNA, 25 bp, Homo sapiens
tgtctactttccaggtaaccaacga

SEQ ID NO: 3261 - DNA, 25 bp, Homo sapiens
tccgtcatagagaatttcgtgtccg

SEQ ID NO: 3262 - DNA, 25 bp, Homo sapiens
aaccgtagtgtaccatcattctgcc

SEQ ID NO: 3263 - DNA, 24 bp, Homo sapiens
cttcggtgaatggaccaaaaggag

SEQ ID NO: 3264 - DNA, 24 bp, Homo sapiens
ttcggtgaatggaccaaaaggaga

SEQ ID NO: 3265 - DNA, 24 bp, Homo sapiens
tcttcggtgaatggaccaaaagga

SEQ ID NO: 3266 - DNA, 25 bp, Homo sapiens
ttcatctggctctccttctactcgc

SEQ ID NO: 3267 - DNA, 25 bp, Homo sapiens
actcgtcattatgtcactgttacca

SEQ ID NO: 3268 - DNA, 25 bp, Homo sapiens
caactcttccttctacttggtcacg

SEQ ID NO: 3269 - DNA, 25 bp, Homo sapiens
actcgtcattatgtcactgttacca

SEQ ID NO: 3270 - DNA, 25 bp, Homo sapiens
caactcttccttctacttggtcacg

SEQ ID NO: 3271 - DNA, 23 bp, Homo sapiens
taaaagacaagtttaggaggaaa

SEQ ID NO: 3272 - DNA, 25 bp, Homo sapiens
tggattttattctggtcgaagagcg

SEQ ID NO: 3273 - DNA, 25 bp, Homo sapiens
acaagattagaatcggaacggtcgt

SEQ ID NO: 3274 - DNA, 25 bp, Homo sapiens
ccatcaggtatccgtaatcttccaa

SEQ ID NO: 3275 - DNA, 25 bp, Homo sapiens
taagtaaggtgggtggtgtagagcg

SEQ ID NO: 3276 - DNA, 25 bp, Homo sapiens
tgtgcgtactataaaggaccgaact

SEQ ID NO: 3277 - DNA, 25 bp, Homo sapiens
taagtaaggtgggtggtgtagagcg

SEQ ID NO: 3278 - DNA, 25 bp, Homo sapiens
tgtgcgtactataaaggaccgaact

SEQ ID NO: 3279 - DNA, 25 bp, Homo sapiens
acgagagagtatgtatagtcccacg

SEQ ID NO: 3280 - DNA, 23 bp, Homo sapiens
gaccgttaagacgtccgtattgt

SEQ ID NO: 3281 - DNA, 25 bp, Homo sapiens
agcgtaattaaggactatttcgtca

SEQ ID NO: 3282 - DNA, 23 bp, Homo sapiens
aagtggattgagacggcgaaggt

SEQ ID NO: 3283 - DNA, 24 bp, Homo sapiens
cctagtgagcacttccgacgtacc

SEQ ID NO: 3284 - DNA, 24 bp, Homo sapiens
ctcccgtatggtggacaccgctag

SEQ ID NO: 3285 - DNA, 24 bp, Homo sapiens
gaccaataaggattcgaccgtggc

SEQ ID NO: 3286 - DNA, 24 bp, Homo sapiens
aacagtaacgactttcaagcggta

SEQ ID NO: 3287 - DNA, 24 bp, Homo sapiens
agaggttgagctctacctagaaaa

SEQ ID NO: 3288 - DNA, 24 bp, Homo sapiens
agaggtagtgagtcttctcctaag

SEQ ID NO: 3289 - DNA, 24 bp, Homo sapiens
tcgtcgaggtcgtataggaggaga

SEQ ID NO: 3290 - DNA, 24 bp, Homo sapiens
acttcatcatcaataccgctcacc

SEQ ID NO: 3291 - DNA, 24 bp, Homo sapiens
ctgtcctgtaaacttccttcgggc

SEQ ID NO: 3292 - DNA, 24 bp, Homo sapiens
aacttgtcgagggaaagagagttg

SEQ ID NO: 3293 - DNA, 24 bp, Homo sapiens
actgctactactactactgagtct

SEQ ID NO: 3294 - DNA, 24 bp, Homo sapiens
gactgctaggaggtacaagatgga

SEQ ID NO: 3295 - DNA, 24 bp, Homo sapiens
tactgtcgaatagactactcgaga

SEQ ID NO: 3296 - DNA, 24 bp, Homo sapiens
actgtcgaatagactactcgagag

SEQ ID NO: 3297 - DNA, 24 bp, Homo sapiens
ttactgtcgaatagactactcgag

SEQ ID NO: 3298 - DNA, 24 bp, Homo sapiens
ggaactcagaaccgttaggcgtca

SEQ ID NO: 3299 - DNA, 24 bp, Homo sapiens
aagagatcctcgtgactgacttcg

SEQ ID NO: 3300 - DNA, 24 bp, Homo sapiens
tggtgataaggaaggttactgtcg

SEQ ID NO: 3301 - DNA, 24 bp, Homo sapiens
ggtgataaggaaggttactgtcga

SEQ ID NO: 3302 - DNA, 24 bp, Homo sapiens
ggtccgtacacaaaatctcagacg

SEQ ID NO: 3303 - DNA, 24 bp, Homo sapiens
gtccgtacacaaaatctcagacgt

SEQ ID NO: 3304 - DNA, 24 bp, Homo sapiens
aggtccgtacacaaaatctcagac

SEQ ID NO: 3305 - DNA, 25 bp, Homo sapiens
ccgaacgacatcatagacccacagt

SEQ ID NO: 3306 - DNA, 25 bp, Homo sapiens
cgtaagaagcgtcattcctttcggt

SEQ ID NO: 3307 - DNA, 25 bp, Homo sapiens
accatcattcaacagaggaggacga

SEQ ID NO: 3308 - DNA, 25 bp, Homo sapiens
gaagtacgagtacactacggaacca

SEQ ID NO: 3309 - DNA, 25 bp, Homo sapiens
tataaggttgaattaacggctgacg

SEQ ID NO: 3310 - DNA, 25 bp, Homo sapiens
aaaccacggaccaagacctatttca

SEQ ID NO: 3311 - DNA, 25 bp, Homo sapiens
agaagttgttatattaaagacggaa

SEQ ID NO: 3312 - DNA, 24 bp, Homo sapiens
aagaagaagccaacaactccacac

SEQ ID NO: 3313 - DNA, 25 bp, Homo sapiens
accttcaacatacaaatagactcgt

SEQ ID NO: 3314 - DNA, 25 bp, Homo sapiens
agatgtgaaggaagttgcacgcact

SEQ ID NO: 3315 - DNA, 24 bp, Homo sapiens
tagaggaggagagtgtcggtggaa

SEQ ID NO: 3316 - DNA, 25 bp, Homo sapiens
gtttcgtggacccagtatgaacagg

SEQ ID NO: 3317 - DNA, 25 bp, Homo sapiens
taagatcaacctcacgacgtttggg

SEQ ID NO: 3318 - DNA, 23 bp, Homo sapiens
gtgaagtagacccggacgtcact

SEQ ID NO: 3319 - DNA, 23 bp, Homo sapiens
tagccaggtttacaggaacggac

SEQ ID NO: 3320 - DNA, 24 bp, Homo sapiens
ttcgacgtgaagaacaccttgtac

SEQ ID NO: 3321 - DNA, 24 bp, Homo sapiens
ggtgaagtaatccgagcagggtgg

SEQ ID NO: 3322 - DNA, 25 bp, Homo sapiens
acgaagatagactggttagaagaca

SEQ ID NO: 3323 - DNA, 25 bp, Homo sapiens
gtgagaacgaaagatgaagagaagt

SEQ ID NO: 3324 - DNA, 23 bp, Homo sapiens
aaggagtggtgaaccgtggacac

SEQ ID NO: 3325 - DNA, 25 bp, Homo sapiens
ggtaaaggtaacgagtctggacaca

SEQ ID NO: 3326 - DNA, 25 bp, Homo sapiens
cgactttcaaacgctaatagacgcc

SEQ ID NO: 3327 - DNA, 25 bp, Homo sapiens
tgacacagtcgaagtaccgaagtct

SEQ ID NO: 3328 - DNA, 24 bp, Homo sapiens
gtcacaccaacgatttcacgagta

SEQ ID NO: 3329 - DNA, 24 bp, Homo sapiens
caggaagacgtgacagtcgttgtg

SEQ ID NO: 3330 - DNA, 24 bp, Homo sapiens
cgagacgacattaacggtaccttc

SEQ ID NO: 3331 - DNA, 24 bp, Homo sapiens
ccaggcgaggacaaggaactataa

SEQ ID NO: 3332 - DNA, 24 bp, Homo sapiens
cgtcatcgtactacagcaacctct

SEQ ID NO: 3333 - DNA, 24 bp, Homo sapiens
agagtcaccgagacgacattaacg

SEQ ID NO: 3334 - DNA, 24 bp, Homo sapiens
cggaacgacgatccatcggactct

SEQ ID NO: 3335 - DNA, 24 bp, Homo sapiens
tgcaagtgtgaccgtcaggaagac

SEQ ID NO: 3336 - DNA, 24 bp, Homo sapiens
agagtcaccgagacgacattaacg

SEQ ID NO: 3337 - DNA, 24 bp, Homo sapiens
ccaggcgaggacaaggaactataa

SEQ ID NO: 3338 - DNA, 24 bp, Homo sapiens
cgtcatcgtactacagcaacctct

SEQ ID NO: 3339 - DNA, 24 bp, Homo sapiens
gtcacaccaacgatttcacgagta

SEQ ID NO: 3340 - DNA, 24 bp, Homo sapiens
ccaggcgaggacaaggaactataa

SEQ ID NO: 3341 - DNA, 24 bp, Homo sapiens
cccctacccagaaaagtgtcccta

SEQ ID NO: 3342 - DNA, 24 bp, Homo sapiens
cctcttcaagaatcctaatatccg

SEQ ID NO: 3343 - DNA, 24 bp, Homo sapiens
aatccgagagtggacccgactctt

SEQ ID NO: 3344 - DNA, 24 bp, Homo sapiens
atccgagagtggacccgactcttc

SEQ ID NO: 3345 - DNA, 24 bp, Homo sapiens
caatccgagagtggacccgactct

SEQ ID NO: 3346 - DNA, 24 bp, Homo sapiens
aaggtctggttggaagttccgagc

SEQ ID NO: 3347 - DNA, 24 bp, Homo sapiens
aggtctggttggaagttccgagct

SEQ ID NO: 3348 - DNA, 24 bp, Homo sapiens
aaaggtctggttggaagttccgag

SEQ ID NO: 3349 - DNA, 24 bp, Homo sapiens
agtgtgttaattgataccggttgt

SEQ ID NO: 3350 - DNA, 24 bp, Homo sapiens
gtgtgttaattgataccggttgtc

SEQ ID NO: 3351 - DNA, 24 bp, Homo sapiens
gagtgtgttaattgataccggttg

SEQ ID NO: 3352 - DNA, 24 bp, Homo sapiens
acagaagtaggcacggggtagaca

SEQ ID NO: 3353 - DNA, 24 bp, Homo sapiens
aaatacgacaggtgttacaggaaa

SEQ ID NO: 3354 - DNA, 24 bp, Homo sapiens
caaggagtgtgttaattgataccg

SEQ ID NO: 3355 - DNA, 24 bp, Homo sapiens
acagaagtaggcacggggtagaca

SEQ ID NO: 3356 - DNA, 24 bp, Homo sapiens
cgaggaatttgtgtcctagagtca

SEQ ID NO: 3357 - DNA, 24 bp, Homo sapiens
acgacaggtgttacaggaaaaccg

SEQ ID NO: 3358 - DNA, 24 bp, Homo sapiens
agttttacgggtctattaagagga

SEQ ID NO: 3359 - DNA, 24 bp, Homo sapiens
tgtacaccctcctagcggcgctgg

SEQ ID NO: 3360 - DNA, 24 bp, Homo sapiens
gtacaccctcctagcggcgctggg

SEQ ID NO: 3361 - DNA, 24 bp, Homo sapiens
ctgtacaccctcctagcggcgctg

SEQ ID NO: 3362 - DNA, 24 bp, Homo sapiens
agtggcagcatcatcatcgtctga

SEQ ID NO: 3363 - DNA, 24 bp, Homo sapiens
aaagaagccgtcaccgaaataccc

SEQ ID NO: 3364 - DNA, 24 bp, Homo sapiens
cgtagacgaatgatatgagtctgt

SEQ ID NO: 3365 - DNA, 24 bp, Homo sapiens
taaggtggtgaagtgacacaggta

SEQ ID NO: 3366 - DNA, 25 bp, Homo sapiens
aacaggtgagaggtagttgtgtaac

SEQ ID NO: 3367 - DNA, 25 bp, Homo sapiens
agaggtgtccatgagaggaggtgtt

SEQ ID NO: 3368 - DNA, 25 bp, Homo sapiens
cgggtcggtacaagttcaagtccat

SEQ ID NO: 3369 - DNA, 25 bp, Homo sapiens
ggtgacttagaggtatcattattcc

SEQ ID NO: 3370 - DNA, 24 bp, Homo sapiens
cccaggtatgaggtacttatgtgc

SEQ ID NO: 3371 - DNA, 25 bp, Homo sapiens
agaggcgtgtaaaatgttctaccga

SEQ ID NO: 3372 - DNA, 24 bp, Homo sapiens
ctttcgttccgtggccagtaggag

SEQ ID NO: 3373 - DNA, 24 bp, Homo sapiens
tttcgttccgtggccagtaggagt

SEQ ID NO: 3374 - DNA, 24 bp, Homo sapiens
cctttcgttccgtggccagtagga

SEQ ID NO: 3375 - DNA, 24 bp, Homo sapiens
cgccttttccaccagaagggaccc

SEQ ID NO: 3376 - DNA, 24 bp, Homo sapiens
gccttttccaccagaagggacccg

SEQ ID NO: 3377 - DNA, 24 bp, Homo sapiens
acgccttttccaccagaagggacc

SEQ ID NO: 3378 - DNA, 24 bp, Homo sapiens
cccgagagagtcaaggtgtcccga

SEQ ID NO: 3379 - DNA, 24 bp, Homo sapiens
cagagactgtgaggacaccactgt

SEQ ID NO: 3380 - DNA, 24 bp, Homo sapiens
tgagggtcacgaactcttctccga

SEQ ID NO: 3381 - DNA, 24 bp, Homo sapiens
tcgtctgtaccagaaggtggagag

SEQ ID NO: 3382 - DNA, 24 bp, Homo sapiens
cgtctgtaccagaaggtggagaga

SEQ ID NO: 3383 - DNA, 24 bp, Homo sapiens
atcgtctgtaccagaaggtggaga

SEQ ID NO: 3384 - DNA, 24 bp, Homo sapiens
acgaagaagaatacgaggagggct

SEQ ID NO: 3385 - DNA, 24 bp, Homo sapiens
agaaggtggagagactcgtgaaga

SEQ ID NO: 3386 - DNA, 24 bp, Homo sapiens
ccgctatgagtctcgtcttctcct

SEQ ID NO: 3387 - DNA, 24 bp, Homo sapiens
ccgctatgagtctcgtcttctcct

SEQ ID NO: 3388 - DNA, 24 bp, Homo sapiens
agcgttgtagtggttacctgtccg

SEQ ID NO: 3389 - DNA, 24 bp, Homo sapiens
aagtattccgacgaacagtagacg

SEQ ID NO: 3390 - DNA, 24 bp, Homo sapiens
gcgaaaacggtatagaagtttaaa

SEQ ID NO: 3391 - DNA, 24 bp, Homo sapiens
aaagtaaagagaaagtattgcccg

SEQ ID NO: 3392 - DNA, 24 bp, Homo sapiens
ccgctatgagtctcgtcttctcct

SEQ ID NO: 3393 - DNA, 24 bp, Homo sapiens
ccgctatgagtctcgtcttctcct

SEQ ID NO: 3394 - DNA, 24 bp, Homo sapiens
ggtgtagagagggtcaaagaagcg

SEQ ID NO: 3395 - DNA, 24 bp, Homo sapiens
aagtattccgacgaacagtagacg

SEQ ID NO: 3396 - DNA, 24 bp, Homo sapiens
tggttacctgtccggtcctacaag

SEQ ID NO: 3397 - DNA, 24 bp, Homo sapiens
ggtgtagagagggtcaaagaagcg

SEQ ID NO: 3398 - DNA, 24 bp, Homo sapiens
aagtattccgacgaacagtagacg

SEQ ID NO: 3399 - DNA, 24 bp, Homo sapiens
acgaagaagaatacgaggagggct

SEQ ID NO: 3400 - DNA, 24 bp, Homo sapiens
agaaggtggagagactcgtgaaga

SEQ ID NO: 3401 - DNA, 24 bp, Homo sapiens
cggaacaggcgaaaacggtataga

SEQ ID NO: 3402 - DNA, 24 bp, Homo sapiens
aagggccgtccagacgtgcttctt

SEQ ID NO: 3403 - DNA, 24 bp, Homo sapiens
agggccgtccagacgtgcttcttc

SEQ ID NO: 3404 - DNA, 24 bp, Homo sapiens
gaagggccgtccagacgtgcttct

SEQ ID NO: 3405 - DNA, 24 bp, Homo sapiens
ctcgtaaccccaggaaaaagaagg

SEQ ID NO: 3406 - DNA, 24 bp, Homo sapiens
tagaaacccgctacaagtctcgtt

SEQ ID NO: 3407 - DNA, 24 bp, Homo sapiens
tgacgagtctggtgtaaagtgggt

SEQ ID NO: 3408 - DNA, 24 bp, Homo sapiens
aggaggaggaggagtagaagacca

SEQ ID NO: 3409 - DNA, 24 bp, Homo sapiens
tagaaacccgctacaagtctcgtt

SEQ ID NO: 3410 - DNA, 24 bp, Homo sapiens
ggttacctatccggtcccacaagt

SEQ ID NO: 3411 - DNA, 24 bp, Homo sapiens
tgacgagtctggtgtaaagtgggt

SEQ ID NO: 3412 - DNA, 24 bp, Homo sapiens
actggagttagtatcggagacacc

SEQ ID NO: 3413 - DNA, 24 bp, Homo sapiens
catcggaggatacgagggtcggta

SEQ ID NO: 3414 - DNA, 24 bp, Homo sapiens
ctaccgccactgttacaaacgacg

SEQ ID NO: 3415 - DNA, 24 bp, Homo sapiens
tgaagagactgttggaaccgacct

SEQ ID NO: 3416 - DNA, 24 bp, Homo sapiens
actggagttagtatcggagacacc

SEQ ID NO: 3417 - DNA, 24 bp, Homo sapiens
tgtccgttacatctaccgccactg

SEQ ID NO: 3418 - DNA, 25 bp, Homo sapiens
ccttcttctctgttgtccttacggt

SEQ ID NO: 3419 - DNA, 25 bp, Homo sapiens
aacgtaagtggtcgaagaaggaaca

SEQ ID NO: 3420 - DNA, 24 bp, Homo sapiens
ggtgtcggacggtaaggtacatac

SEQ ID NO: 3421 - DNA, 23 bp, Homo sapiens
ttccgtccgatcagtgtcctccc

SEQ ID NO: 3422 - DNA, 25 bp, Homo sapiens
ttcaccagcggagagaggagagtaa

SEQ ID NO: 3423 - DNA, 25 bp, Homo sapiens
agtagaaggtatgcggtgggaaacg

SEQ ID NO: 3424 - DNA, 25 bp, Homo sapiens
tatacttcgcctttgtcgtcttccc

SEQ ID NO: 3425 - DNA, 25 bp, Homo sapiens
cgacctcctaaaccgttaccttcta

SEQ ID NO: 3426 - DNA, 25 bp, Homo sapiens
ggtatgtcgagtgttggaacgtggt

SEQ ID NO: 3427 - DNA, 23 bp, Homo sapiens
tcccctgcctcttcccacaagac

SEQ ID NO: 3428 - DNA, 24 bp, Homo sapiens
agttttctcctcggcatgtagagg

SEQ ID NO: 3429 - DNA, 24 bp, Homo sapiens
gttttctcctcggcatgtagaggc

SEQ ID NO: 3430 - DNA, 24 bp, Homo sapiens
cagttttctcctcggcatgtagag

SEQ ID NO: 3431 - DNA, 24 bp, Homo sapiens
ggctcgttatcctcctcctcctcc

SEQ ID NO: 3432 - DNA, 25 bp, Homo sapiens
ggcgacaggtgagaatcttaacttc

SEQ ID NO: 3433 - DNA, 25 bp, Homo sapiens
agatgacgaacaaacgagacaagga

SEQ ID NO: 3434 - DNA, 25 bp, Homo sapiens
tagtattatcagggcaactttcagt

SEQ ID NO: 3435 - DNA, 24 bp, Homo sapiens
ggctcgttatcctcctcctcctcc

SEQ ID NO: 3436 - DNA, 25 bp, Homo sapiens
gggaagcacttcacaaaggactatg

SEQ ID NO: 3437 - DNA, 24 bp, Homo sapiens
ggctcgttatcctcctcctcctcc

SEQ ID NO: 3438 - DNA, 25 bp, Homo sapiens
gggaagcacttcacaaaggactatg

SEQ ID NO: 3439 - DNA, 25 bp, Homo sapiens
ggcgacaggtgagaatcttaacttc

SEQ ID NO: 3440 - DNA, 23 bp, Homo sapiens
tgccctcaagtacctcgctccta

SEQ ID NO: 3441 - DNA, 25 bp, Homo sapiens
aactggtgttctcacaactctaagg

SEQ ID NO: 3442 - DNA, 24 bp, Homo sapiens
cgggaatacttgtctcgtcgggtg

SEQ ID NO: 3443 - DNA, 24 bp, Homo sapiens
cccagtcgaggaagaattaccgga

SEQ ID NO: 3444 - DNA, 24 bp, Homo sapiens
ccagtcgaggaagaattaccggac

SEQ ID NO: 3445 - DNA, 24 bp, Homo sapiens
acccagtcgaggaagaattaccgg

SEQ ID NO: 3446 - DNA, 23 bp, Homo sapiens
gtgaaaaccgagacgtcggtcca

SEQ ID NO: 3447 - DNA, 24 bp, Homo sapiens
ggacgaaaaggagccaagtgaaaa

SEQ ID NO: 3448 - DNA, 24 bp, Homo sapiens
gacgaaaaggagccaagtgaaaac

SEQ ID NO: 3449 - DNA, 24 bp, Homo sapiens
tggacgaaaaggagccaagtgaaa

SEQ ID NO: 3450 - DNA, 24 bp, Homo sapiens
ggctcgttatcctcctcctcctcc

SEQ ID NO: 3451 - DNA, 25 bp, Homo sapiens
ggcgacaggtgagaatcttaacttc

SEQ ID NO: 3452 - DNA, 25 bp, Homo sapiens
ccagtagaggaaagttgaaaggtct

SEQ ID NO: 3453 - DNA, 25 bp, Homo sapiens
gtaagacggtaggagaggacgatgt

SEQ ID NO: 3454 - DNA, 24 bp, Homo sapiens
ggctcgttatcctcctcctcctcc

SEQ ID NO: 3455 - DNA, 25 bp, Homo sapiens
ggcgacaggtgagaatcttaacttc

SEQ ID NO: 3456 - DNA, 23 bp, Homo sapiens
gcgtagtgaagtagccgactcgt

SEQ ID NO: 3457 - DNA, 25 bp, Homo sapiens
cggtaaaacctagaacgttagtctc

SEQ ID NO: 3458 - DNA, 25 bp, Homo sapiens
gaagagaccacatctactttgctta

SEQ ID NO: 3459 - DNA, 23 bp, Homo sapiens
gcgtagtgaagtagccgactcgt

SEQ ID NO: 3460 - DNA, 25 bp, Homo sapiens
tgaaccagacggaagagaccacatc

SEQ ID NO: 3461 - DNA, 25 bp, Homo sapiens
aggagaagtctaagttcaagttgtt

SEQ ID NO: 3462 - DNA, 25 bp, Homo sapiens
tgaaccagacggaagagaccacatc

SEQ ID NO: 3463 - DNA, 25 bp, Homo sapiens
ccaaagagacaggaagaagtttcgg

SEQ ID NO: 3464 - DNA, 25 bp, Homo sapiens
ccgataagcctggacatacgaagtt

SEQ ID NO: 3465 - DNA, 25 bp, Homo sapiens
gttgtgacaatctgaacttatgaag

SEQ ID NO: 3466 - DNA, 25 bp, Homo sapiens
ccgataagcctggacatacgaagtt

SEQ ID NO: 3467 - DNA, 24 bp, Homo sapiens
cggtttaccctcaggagattcggc

SEQ ID NO: 3468 - DNA, 24 bp, Homo sapiens
tcaagaggtagaagtcacggagtt

SEQ ID NO: 3469 - DNA, 24 bp, Homo sapiens
cgtgagaggtcttgccgaactatg

SEQ ID NO: 3470 - DNA, 24 bp, Homo sapiens
tagtcgttcttcgttactggagag

SEQ ID NO: 3471 - DNA, 24 bp, Homo sapiens
gccgaaggtattcttgcctccctg

SEQ ID NO: 3472 - DNA, 24 bp, Homo sapiens
cgtgagaggtcttgccgaactatg

SEQ ID NO: 3473 - DNA, 24 bp, Homo sapiens
tagtcgttcttcgttactggagag

SEQ ID NO: 3474 - DNA, 24 bp, Homo sapiens
acaagaaggtagcgttgagactaa

SEQ ID NO: 3475 - DNA, 24 bp, Homo sapiens
gcaaaaaggtataggaccgtccat

SEQ ID NO: 3476 - DNA, 24 bp, Homo sapiens
acgacttaagaccgataagaagcg

SEQ ID NO: 3477 - DNA, 24 bp, Homo sapiens
cgtgagaggtcttgccgaactatg

SEQ ID NO: 3478 - DNA, 24 bp, Homo sapiens
tagtcgttcttcgttactggagag

SEQ ID NO: 3479 - DNA, 24 bp, Homo sapiens
acttcaactcgcattatggtcaga

SEQ ID NO: 3480 - DNA, 24 bp, Homo sapiens
agtcacggagttgaacgaaattgt

SEQ ID NO: 3481 - DNA, 24 bp, Homo sapiens
tcgagaacagcttctaaactcaag

SEQ ID NO: 3482 - DNA, 24 bp, Homo sapiens
caaaggtcaaaacattctactaac

SEQ ID NO: 3483 - DNA, 24 bp, Homo sapiens
acttcaactcgcattatggtcaga

SEQ ID NO: 3484 - DNA, 24 bp, Homo sapiens
acaagaaggtagcgttgagactaa

SEQ ID NO: 3485 - DNA, 24 bp, Homo sapiens
gaccgataagaagcgacacgagca

SEQ ID NO: 3486 - DNA, 24 bp, Homo sapiens
agtatagtagttaagagggttact

SEQ ID NO: 3487 - DNA, 24 bp, Homo sapiens
gtatagtagttaagagggttacta

SEQ ID NO: 3488 - DNA, 24 bp, Homo sapiens
gagtatagtagttaagagggttac

SEQ ID NO: 3489 - DNA, 24 bp, Homo sapiens
ggttactagaccagtctgtaccag

SEQ ID NO: 3490 - DNA, 24 bp, Homo sapiens
ggtctagtagttacgctgatgagt

SEQ ID NO: 3491 - DNA, 24 bp, Homo sapiens
aaagtgaaaggtcaagaaggtggg

SEQ ID NO: 3492 - DNA, 24 bp, Homo sapiens
tctctctgaatgtaaaaggttagg

SEQ ID NO: 3493 - DNA, 24 bp, Homo sapiens
ctctctgaatgtaaaaggttaggt

SEQ ID NO: 3494 - DNA, 24 bp, Homo sapiens
ctctctctgaatgtaaaaggttag

SEQ ID NO: 3495 - DNA, 24 bp, Homo sapiens
actgtgttggtggaaaagttgaaa

SEQ ID NO: 3496 - DNA, 24 bp, Homo sapiens
ctgtgttggtggaaaagttgaaaa

SEQ ID NO: 3497 - DNA, 24 bp, Homo sapiens
aactgtgttggtggaaaagttgaa

SEQ ID NO: 3498 - DNA, 24 bp, Homo sapiens
cgtcgtagttgtcgaagtccgttc

SEQ ID NO: 3499 - DNA, 24 bp, Homo sapiens
agtagacgactgagtgacaggtga

SEQ ID NO: 3500 - DNA, 24 bp, Homo sapiens
ccaagaccatcgttcgaccaggtt

SEQ ID NO: 3501 - DNA, 24 bp, Homo sapiens
aatacggtcttatgagacgcaccc

SEQ ID NO: 3502 - DNA, 24 bp, Homo sapiens
atacggtcttatgagacgcaccca

SEQ ID NO: 3503 - DNA, 24 bp, Homo sapiens
gaatacggtcttatgagacgcacc

SEQ ID NO: 3504 - DNA, 25 bp, Homo sapiens
ggtagtgttcctggtgaaagactca

SEQ ID NO: 3505 - DNA, 25 bp, Homo sapiens
agacacaaggttactgcgtgcatgt

SEQ ID NO: 3506 - DNA, 25 bp, Homo sapiens
taagtgcgataagaaggtatgtacg

SEQ ID NO: 3507 - DNA, 24 bp, Homo sapiens
aaagaggtagtaggtcccgagaaa

SEQ ID NO: 3508 - DNA, 25 bp, Homo sapiens
tggactgaaggtacgaagggaaggt

SEQ ID NO: 3509 - DNA, 24 bp, Homo sapiens
tctccactcttaacgaccagactt

SEQ ID NO: 3510 - DNA, 24 bp, Homo sapiens
aggacgagaccgttttccagaact

SEQ ID NO: 3511 - DNA, 24 bp, Homo sapiens
cacgtttaacagttccggggtcga

SEQ ID NO: 3512 - DNA, 24 bp, Homo sapiens
tggaagtaagtgtcaagaggtcag

SEQ ID NO: 3513 - DNA, 24 bp, Homo sapiens
gacctctagctcgacgttcgtgtc

SEQ ID NO: 3514 - DNA, 24 bp, Homo sapiens
acctctagctcgacgttcgtgtct

SEQ ID NO: 3515 - DNA, 24 bp, Homo sapiens
tgacctctagctcgacgttcgtgt

SEQ ID NO: 3516 - DNA, 23 bp, Homo sapiens
gttaggacgtatcggaaccagtt

SEQ ID NO: 3517 - DNA, 25 bp, Homo sapiens
tgaccattagaggttatgttcacga

SEQ ID NO: 3518 - DNA, 25 bp, Homo sapiens
ttgggtgtcaaacaacctgtcaatt

SEQ ID NO: 3519 - DNA, 24 bp, Homo sapiens
acgtctattaccgaagagacttct

SEQ ID NO: 3520 - DNA, 24 bp, Homo sapiens
cgtctattaccgaagagacttctg

SEQ ID NO: 3521 - DNA, 24 bp, Homo sapiens
aacgtctattaccgaagagacttc

SEQ ID NO: 3522 - DNA, 24 bp, Homo sapiens
tggtacagcagctactcggatacg

SEQ ID NO: 3523 - DNA, 24 bp, Homo sapiens
tcaggctgacgtgcagtggtagta

SEQ ID NO: 3524 - DNA, 24 bp, Homo sapiens
cggagacgaagatgacagaacggt

SEQ ID NO: 3525 - DNA, 24 bp, Homo sapiens
acagcaagtcgagaaaaaggaaca

SEQ ID NO: 3526 - DNA, 24 bp, Homo sapiens
cagcaagtcgagaaaaaggaacaa

SEQ ID NO: 3527 - DNA, 24 bp, Homo sapiens
aacagcaagtcgagaaaaaggaac

SEQ ID NO: 3528 - DNA, 24 bp, Homo sapiens
aagtcgaacttggaaaaggtcaaa

SEQ ID NO: 3529 - DNA, 24 bp, Homo sapiens
agtcgaacttggaaaaggtcaaaa

SEQ ID NO: 3530 - DNA, 24 bp, Homo sapiens
gaagtcgaacttggaaaaggtcaa

SEQ ID NO: 3531 - DNA, 23 bp, Homo sapiens
ctgtgaccgacggacgacaactc

SEQ ID NO: 3532 - DNA, 25 bp, Homo sapiens
tcacgaagtaaggaaacagcaagtc

SEQ ID NO: 3533 - DNA, 25 bp, Homo sapiens
tctggtgtggaaagaacatcggaaa

SEQ ID NO: 3534 - DNA, 24 bp, Homo sapiens
aagaggagacacgagtgcttatca

SEQ ID NO: 3535 - DNA, 24 bp, Homo sapiens
ggaggaacatgactcaccgttaca

SEQ ID NO: 3536 - DNA, 25 bp, Homo sapiens
agacatactctcaagacgtggacga

SEQ ID NO: 3537 - DNA, 24 bp, Homo sapiens
tcaaccacatccgtgactcctgcc

SEQ ID NO: 3538 - DNA, 24 bp, Homo sapiens
tgctatcccaagtacaatatccta

SEQ ID NO: 3539 - DNA, 24 bp, Homo sapiens
tggacaccgtactagaccatgagg

SEQ ID NO: 3540 - DNA, 24 bp, Homo sapiens
agtgtcgtagtggacgttccccgt

SEQ ID NO: 3541 - DNA, 24 bp, Homo sapiens
gtgtcgtagtggacgttccccgtc

SEQ ID NO: 3542 - DNA, 24 bp, Homo sapiens
tagtgtcgtagtggacgttccccg

SEQ ID NO: 3543 - DNA, 25 bp, Homo sapiens
agtccgtcgcaagttacgatagtca

SEQ ID NO: 3544 - DNA, 24 bp, Homo sapiens
tgtttcttgtctacgattgcgacg

SEQ ID NO: 3545 - DNA, 25 bp, Homo sapiens
tagagaagtgaaagttaaggtcccg

SEQ ID NO: 3546 - DNA, 24 bp, Homo sapiens
tgtttcttgtctacgattgcgacg

SEQ ID NO: 3547 - DNA, 25 bp, Homo sapiens
tagagaagtgaaagttaaggtcccg

SEQ ID NO: 3548 - DNA, 24 bp, Homo sapiens
cggatcggacgtatgatcgactgg

SEQ ID NO: 3549 - DNA, 25 bp, Homo sapiens
cggaacagaagcgtgagaataggtc

SEQ ID NO: 3550 - DNA, 25 bp, Homo sapiens
agtccgtcgcaagttacgatagtca

SEQ ID NO: 3551 - DNA, 24 bp, Homo sapiens
tgtttcttgtctacgattgcgacg

SEQ ID NO: 3552 - DNA, 24 bp, Homo sapiens
tgtttcttgtctacgattgcgacg

SEQ ID NO: 3553 - DNA, 25 bp, Homo sapiens
tagagaagtgaaagttaaggtcccg

SEQ ID NO: 3554 - DNA, 25 bp, Homo sapiens
tcaagtcattacagtagacaccgtt

SEQ ID NO: 3555 - DNA, 24 bp, Homo sapiens
tgtttcttgtctacgattgcgacg

SEQ ID NO: 3556 - DNA, 23 bp, Homo sapiens
agaagtgaaagttaaggtcccgg

SEQ ID NO: 3557 - DNA, 23 bp, Homo sapiens
tgatcgactgggtagtgtttact

SEQ ID NO: 3558 - DNA, 24 bp, Homo sapiens
ggtgtcgtagtggacgtataggtc

SEQ ID NO: 3559 - DNA, 24 bp, Homo sapiens
gtgtcgtagtggacgtataggtca

SEQ ID NO: 3560 - DNA, 24 bp, Homo sapiens
aggtgtcgtagtggacgtataggt

SEQ ID NO: 3561 - DNA, 25 bp, Homo sapiens
ggaacctcaactacagtcagtgaac

SEQ ID NO: 3562 - DNA, 23 bp, Homo sapiens
gaagaaccgtcccgtgcgtcaga

SEQ ID NO: 3563 - DNA, 25 bp, Homo sapiens
aaggtgaagattcggtacaggaagt

SEQ ID NO: 3564 - DNA, 25 bp, Homo sapiens
gaacctcaactacagtcagtgaacc

SEQ ID NO: 3565 - DNA, 23 bp, Homo sapiens
gaagaaccgtcccgtgcgtcaga

SEQ ID NO: 3566 - DNA, 25 bp, Homo sapiens
aaggtgaagattcggtacaggaagt

SEQ ID NO: 3567 - DNA, 24 bp, Homo sapiens
ttgaagaggtgttgggagacgtgg

SEQ ID NO: 3568 - DNA, 24 bp, Homo sapiens
tgaccgtagaagtgactaagaacc

SEQ ID NO: 3569 - DNA, 24 bp, Homo sapiens
ccgttgggatgttgtctgggtgtg

SEQ ID NO: 3570 - DNA, 24 bp, Homo sapiens
tagacgaggcggtcaacggtgttc

SEQ ID NO: 3571 - DNA, 24 bp, Homo sapiens
ttgtaggtaatcgtgcggtggtcg

SEQ ID NO: 3572 - DNA, 24 bp, Homo sapiens
cgtcgttaatgagaagcactgtag

SEQ ID NO: 3573 - DNA, 24 bp, Homo sapiens
taagtgttcgtgactaagtgtaag

SEQ ID NO: 3574 - DNA, 24 bp, Homo sapiens
aagtgttcgtgactaagtgtaagg

SEQ ID NO: 3575 - DNA, 24 bp, Homo sapiens
gtaagtgttcgtgactaagtgtaa

SEQ ID NO: 3576 - DNA, 24 bp, Homo sapiens
atcagttcagcatgaggcggtaga

SEQ ID NO: 3577 - DNA, 24 bp, Homo sapiens
gttcttcgcctttctgatctacgg

SEQ ID NO: 3578 - DNA, 24 bp, Homo sapiens
gtgttcgtgactaagtgtaaggga

SEQ ID NO: 3579 - DNA, 24 bp, Homo sapiens
ggagttctgttcggtggttcttct

SEQ ID NO: 3580 - DNA, 24 bp, Homo sapiens
acgactatgtgaccacctacgctg

SEQ ID NO: 3581 - DNA, 24 bp, Homo sapiens
ctttgtgttgatggggttaccgta

SEQ ID NO: 3582 - DNA, 24 bp, Homo sapiens
ggaagtactgtgaaccctgaaagt

SEQ ID NO: 3583 - DNA, 24 bp, Homo sapiens
gaagtactgtgaaccctgaaagtc

SEQ ID NO: 3584 - DNA, 24 bp, Homo sapiens
aggaagtactgtgaaccctgaaag

SEQ ID NO: 3585 - DNA, 24 bp, Homo sapiens
ctgtaaaagagcgagctgtcgttt

SEQ ID NO: 3586 - DNA, 24 bp, Homo sapiens
tgtaaaagagcgagctgtcgtttt

SEQ ID NO: 3587 - DNA, 24 bp, Homo sapiens
actgtaaaagagcgagctgtcgtt

SEQ ID NO: 3588 - DNA, 24 bp, Homo sapiens
acccgtcgaatggtcgtgacatcg

SEQ ID NO: 3589 - DNA, 24 bp, Homo sapiens
cccgtcgaatggtcgtgacatcgt

SEQ ID NO: 3590 - DNA, 24 bp, Homo sapiens
tacccgtcgaatggtcgtgacatc

SEQ ID NO: 3591 - DNA, 24 bp, Homo sapiens
tgcgtatttaaggcgaccacctga

SEQ ID NO: 3592 - DNA, 24 bp, Homo sapiens
gcgtatttaaggcgaccacctgaa

SEQ ID NO: 3593 - DNA, 24 bp, Homo sapiens
atgcgtatttaaggcgaccacctg

SEQ ID NO: 3594 - DNA, 24 bp, Homo sapiens
cgttttaggtagctttaacccggt

SEQ ID NO: 3595 - DNA, 24 bp, Homo sapiens
gttttaggtagctttaacccggta

SEQ ID NO: 3596 - DNA, 24 bp, Homo sapiens
ccgttttaggtagctttaacccgg

SEQ ID NO: 3597 - DNA, 24 bp, Homo sapiens
ttgtgacggtagggttctgtaaga

SEQ ID NO: 3598 - DNA, 24 bp, Homo sapiens
acatggaataagcgaaggaacagt

SEQ ID NO: 3599 - DNA, 24 bp, Homo sapiens
tcaaagttcaaagaccgtcaccga

SEQ ID NO: 3600 - DNA, 24 bp, Homo sapiens
acatggaataagcgaaggaacagt

SEQ ID NO: 3601 - DNA, 24 bp, Homo sapiens
tcaaagttcaaagaccgtcaccga

SEQ ID NO: 3602 - DNA, 24 bp, Homo sapiens
ggagtggacttcctggtgaaggtc

SEQ ID NO: 3603 - DNA, 24 bp, Homo sapiens
tgagacaagagcaagaggtggtta

SEQ ID NO: 3604 - DNA, 24 bp, Homo sapiens
agagacagtcactaagacctcgta

SEQ ID NO: 3605 - DNA, 24 bp, Homo sapiens
gtatgcgtatttaaggcgaccacc

SEQ ID NO: 3606 - DNA, 24 bp, Homo sapiens
cggtgtttcgttttctgccccttg

SEQ ID NO: 3607 - DNA, 25 bp, Homo sapiens
acttctccatccgctcactctgtca

SEQ ID NO: 3608 - DNA, 23 bp, Homo sapiens
ctagtttacccgttgcctaacga

SEQ ID NO: 3609 - DNA, 24 bp, Homo sapiens
ggagtcctgggtgtggtaatagtc

SEQ ID NO: 3610 - DNA, 24 bp, Homo sapiens
agactcttctgtgaaaaggacctc

SEQ ID NO: 3611 - DNA, 24 bp, Homo sapiens
gactcttctgtgaaaaggacctcc

SEQ ID NO: 3612 - DNA, 24 bp, Homo sapiens
aagactcttctgtgaaaaggacct

SEQ ID NO: 3613 - DNA, 24 bp, Homo sapiens
aggctcttctgtgaagttcggacc

SEQ ID NO: 3614 - DNA, 24 bp, Homo sapiens
ggctcttctgtgaagttcggacca

SEQ ID NO: 3615 - DNA, 24 bp, Homo sapiens
aaggctcttctgtgaagttcggac

SEQ ID NO: 3616 - DNA, 25 bp, Homo sapiens
aaggacctccaccacttaggaagga

SEQ ID NO: 3617 - DNA, 25 bp, Homo sapiens
acagcagtgaacatcggaagagtcg

SEQ ID NO: 3618 - DNA, 25 bp, Homo sapiens
agagcagtgaacatcggaagagtcg

SEQ ID NO: 3619 - DNA, 25 bp, Homo sapiens
ttcctccagcgagtcttctaagcac

SEQ ID NO: 3620 - DNA, 25 bp, Homo sapiens
aggacctccaccacttaggaaggaa

SEQ ID NO: 3621 - DNA, 25 bp, Homo sapiens
acagcagtgaacatcggaagagtcg

SEQ ID NO: 3622 - DNA, 24 bp, Homo sapiens
actacgaccatggtgtttgtctag

SEQ ID NO: 3623 - DNA, 24 bp, Homo sapiens
ctacgaccatggtgtttgtctagc

SEQ ID NO: 3624 - DNA, 24 bp, Homo sapiens
aactacgaccatggtgtttgtcta

SEQ ID NO: 3625 - DNA, 24 bp, Homo sapiens
tgacctcgtagacgaattaaaagg

SEQ ID NO: 3626 - DNA, 25 bp, Homo sapiens
gtgtttgtctagcgtctaggtccaa

SEQ ID NO: 3627 - DNA, 24 bp, Homo sapiens
aaaccgaagtacaactctctatgc

SEQ ID NO: 3628 - DNA, 24 bp, Homo sapiens
aaccgaagtacaactctctatgct

SEQ ID NO: 3629 - DNA, 24 bp, Homo sapiens
aaaaccgaagtacaactctctatg

SEQ ID NO: 3630 - DNA, 24 bp, Homo sapiens
aaagaccaccaaccagtaaaggaa

SEQ ID NO: 3631 - DNA, 24 bp, Homo sapiens
caagggagtccgacgaaatgtagt

SEQ ID NO: 3632 - DNA, 24 bp, Homo sapiens
acaacgagagtcaaacacacgaaa

SEQ ID NO: 3633 - DNA, 24 bp, Homo sapiens
cgttgtcacttgagaagtagatag

SEQ ID NO: 3634 - DNA, 24 bp, Homo sapiens
tgacgaacgttgcaaagtggtacc

SEQ ID NO: 3635 - DNA, 24 bp, Homo sapiens
aaaacaacgagagtcaaacacacg

SEQ ID NO: 3636 - DNA, 24 bp, Homo sapiens
gaatccttcaagtgtcgcctctag

SEQ ID NO: 3637 - DNA, 24 bp, Homo sapiens
acgactatcgcaaacgctagtgct

SEQ ID NO: 3638 - DNA, 24 bp, Homo sapiens
actggactgacgaaggaaatacgc

SEQ ID NO: 3639 - DNA, 24 bp, Homo sapiens
ccgtagatcagaaaggcgaggaac

SEQ ID NO: 3640 - DNA, 25 bp, Homo sapiens
gcaagtagaagtgtgagcatcttaa

SEQ ID NO: 3641 - DNA, 25 bp, Homo sapiens
cctttacctaagcaactcagggtga

SEQ ID NO: 3642 - DNA, 25 bp, Homo sapiens
gtatttgtccgaactcttagtccca

SEQ ID NO: 3643 - DNA, 24 bp, Homo sapiens
aagttaccgttgttatcgtgctcg

SEQ ID NO: 3644 - DNA, 23 bp, Homo sapiens
cttccaaggtcctcacttcgccg

SEQ ID NO: 3645 - DNA, 23 bp, Homo sapiens
gaggcactctccgaccaccagtc

SEQ ID NO: 3646 - DNA, 24 bp, Homo sapiens
tccaaggtcctcacttcgccggtc

SEQ ID NO: 3647 - DNA, 24 bp, Homo sapiens
ccaaggtcctcacttcgccggtcg

SEQ ID NO: 3648 - DNA, 24 bp, Homo sapiens
ttccaaggtcctcacttcgccggt

SEQ ID NO: 3649 - DNA, 24 bp, Homo sapiens
gcagactgacttccagaacggtgt

SEQ ID NO: 3650 - DNA, 24 bp, Homo sapiens
ggctgacttccagaacggtgtgag

SEQ ID NO: 3651 - DNA, 24 bp, Homo sapiens
gaggtcgcaactcaagtggctact

SEQ ID NO: 3652 - DNA, 24 bp, Homo sapiens
ggccaatcacttccaaggtcctca

SEQ ID NO: 3653 - DNA, 24 bp, Homo sapiens
gccaatcacttccaaggtcctcac

SEQ ID NO: 3654 - DNA, 24 bp, Homo sapiens
aggccaatcacttccaaggtcctc

SEQ ID NO: 3655 - DNA, 24 bp, Homo sapiens
agactcctctgtgacagggtctaa

SEQ ID NO: 3656 - DNA, 24 bp, Homo sapiens
gactcctctgtgacagggtctaaa

SEQ ID NO: 3657 - DNA, 24 bp, Homo sapiens
aagactcctctgtgacagggtcta

SEQ ID NO: 3658 - DNA, 24 bp, Homo sapiens
cagagaacatcggaagttcggacc

SEQ ID NO: 3659 - DNA, 24 bp, Homo sapiens
agagaacatcggaagttcggacca

SEQ ID NO: 3660 - DNA, 24 bp, Homo sapiens
gcagagaacatcggaagttcggac

SEQ ID NO: 3661 - DNA, 24 bp, Homo sapiens
tcgttattactggacgtctgtttt

SEQ ID NO: 3662 - DNA, 24 bp, Homo sapiens
cgttattactggacgtctgttttt

SEQ ID NO: 3663 - DNA, 24 bp, Homo sapiens
gtcgttattactggacgtctgttt

SEQ ID NO: 3664 - DNA, 25 bp, Homo sapiens
ttaggtgacaacaagactaggaacg

SEQ ID NO: 3665 - DNA, 25 bp, Homo sapiens
aggagaaccacctcttacaagaagt

SEQ ID NO: 3666 - DNA, 25 bp, Homo sapiens
gtctcagaacttgtagtgtttccgt

SEQ ID NO: 3667 - DNA, 24 bp, Homo sapiens
aagagcaagaaaggaggcattacg

SEQ ID NO: 3668 - DNA, 23 bp, Homo sapiens
cactctacccgctggcttcgtaa

SEQ ID NO: 3669 - DNA, 25 bp, Homo sapiens
cttcttcaattcaggagcgaccaca

SEQ ID NO: 3670 - DNA, 25 bp, Homo sapiens
acgaccttctccgacttcatttgtt

SEQ ID NO: 3671 - DNA, 23 bp, Homo sapiens
cactctacccgctggcttcgtaa

SEQ ID NO: 3672 - DNA, 24 bp, Homo sapiens
tccagccgaccttcttcaattcag

SEQ ID NO: 3673 - DNA, 25 bp, Homo sapiens
acgaccttctccgacttcatttgtt

SEQ ID NO: 3674 - DNA, 25 bp, Homo sapiens
gtcaaacacttcaaacactccgtcg

SEQ ID NO: 3675 - DNA, 25 bp, Homo sapiens
aagatttcaacttgtgtttagacgt

SEQ ID NO: 3676 - DNA, 23 bp, Homo sapiens
tttaagggacttcacagactaaa

SEQ ID NO: 3677 - DNA, 24 bp, Homo sapiens
gactacctcatcctctgtttcagg

SEQ ID NO: 3678 - DNA, 24 bp, Homo sapiens
agaagcatctaacgaatgtcagcc

SEQ ID NO: 3679 - DNA, 23 bp, Homo sapiens
cacctggctacctagtaggctag

SEQ ID NO: 3680 - DNA, 23 bp, Homo sapiens
tgtgtcccctcaactacctcggg

SEQ ID NO: 3681 - DNA, 23 bp, Homo sapiens
gcaccaacctcacatcgacaccg

SEQ ID NO: 3682 - DNA, 25 bp, Homo sapiens
gaagacgactacctcatcctctgtt

SEQ ID NO: 3683 - DNA, 23 bp, Homo sapiens
caccaacctcacatcgacaccgc

SEQ ID NO: 3684 - DNA, 25 bp, Homo sapiens
cggactcgcattcaacctcaatctc

SEQ ID NO: 3685 - DNA, 24 bp, Homo sapiens
ttcttagaaggtacgggacgagac

SEQ ID NO: 3686 - DNA, 24 bp, Homo sapiens
tgtaactttatgaaacgagacccg

SEQ ID NO: 3687 - DNA, 24 bp, Homo sapiens
acacaacccaaaatacactttcgt

SEQ ID NO: 3688 - DNA, 24 bp, Homo sapiens
aatagacaccactccacgctcctg

SEQ ID NO: 3689 - DNA, 24 bp, Homo sapiens
tcccaaaagaatccgaaaccgtgt

SEQ ID NO: 3690 - DNA, 24 bp, Homo sapiens
aactcattctacactcgtccacaa

SEQ ID NO: 3691 - DNA, 24 bp, Homo sapiens
aacatcccaaagagaggtcacacg

SEQ ID NO: 3692 - DNA, 24 bp, Homo sapiens
acacatcattctcaactctcaacg

SEQ ID NO: 3693 - DNA, 24 bp, Homo sapiens
tggaaacggcgtaagaagtgtaaa

SEQ ID NO: 3694 - DNA, 24 bp, Homo sapiens
cgtgtcaccacaatcaagagtagg

SEQ ID NO: 3695 - DNA, 24 bp, Homo sapiens
accgaacctctgtctaatcgtagg

SEQ ID NO: 3696 - DNA, 24 bp, Homo sapiens
gtgcctgtgctgccatcagaagtt

SEQ ID NO: 3697 - DNA, 24 bp, Homo sapiens
tgggcgtaacagtagagtatccgt

SEQ ID NO: 3698 - DNA, 24 bp, Homo sapiens
gcgtgaactttgtaaggtccacta

SEQ ID NO: 3699 - DNA, 24 bp, Homo sapiens
ggacaagcgtgtgatacagtctca

SEQ ID NO: 3700 - DNA, 24 bp, Homo sapiens
aggacgagtgaaggtttacaaagt

SEQ ID NO: 3701 - DNA, 24 bp, Homo sapiens
aaggctcttctgtgaagttcggac

SEQ ID NO: 3702 - DNA, 25 bp, Homo sapiens
agaaggagcagtgaacatcggaagt

SEQ ID NO: 3703 - DNA, 23 bp, Homo sapiens
acatcggaagttcggaccaccaa

SEQ ID NO: 3704 - DNA, 25 bp, Homo sapiens
acagcagtgaacatcggaagagtcg

SEQ ID NO: 3705 - DNA, 25 bp, Homo sapiens
agagtagtgaacatcggaagagtcg

SEQ ID NO: 3706 - DNA, 23 bp, Homo sapiens
aggtctaaagggtggcgggcaat

SEQ ID NO: 3707 - DNA, 24 bp, Homo sapiens
aggctcttctgtgaagttcggacg

SEQ ID NO: 3708 - DNA, 24 bp, Homo sapiens
ggctcttctgtgaagttcggacga

SEQ ID NO: 3709 - DNA, 24 bp, Homo sapiens
aaggctcttctgtgaagttcggac

SEQ ID NO: 3710 - DNA, 24 bp, Homo sapiens
agaaagacactcgacgtttttgga

SEQ ID NO: 3711 - DNA, 24 bp, Homo sapiens
gaaagacactcgacgtttttggaa

SEQ ID NO: 3712 - DNA, 24 bp, Homo sapiens
aagaaagacactcgacgtttttgg

SEQ ID NO: 3713 - DNA, 24 bp, Homo sapiens
aaggacacggaccaacagtagaag

SEQ ID NO: 3714 - DNA, 24 bp, Homo sapiens
gccgaaaggactaactaccgaggg

SEQ ID NO: 3715 - DNA, 24 bp, Homo sapiens
agtcaagaagattaagtcgcacga

SEQ ID NO: 3716 - DNA, 24 bp, Homo sapiens
aaggacacggaccaacagtagaag

SEQ ID NO: 3717 - DNA, 24 bp, Homo sapiens
gccgaaaggactaactaccgaggg

SEQ ID NO: 3718 - DNA, 24 bp, Homo sapiens
agcatctcttctaccgaacctcaa

SEQ ID NO: 3719 - DNA, 24 bp, Homo sapiens
aggacacggaccaacagtagaagt

SEQ ID NO: 3720 - DNA, 24 bp, Homo sapiens
gccgaaaggactaactaccgaggg

SEQ ID NO: 3721 - DNA, 24 bp, Homo sapiens
agtcaagaagattaagtcgcacga

SEQ ID NO: 3722 - DNA, 24 bp, Homo sapiens
gccgaaaggactaactaccgaggg

SEQ ID NO: 3723 - DNA, 24 bp, Homo sapiens
agtcaagaagattaagtcgcacga

SEQ ID NO: 3724 - DNA, 24 bp, Homo sapiens
agcatctcttctaccgaacctcaa

SEQ ID NO: 3725 - DNA, 24 bp, Homo sapiens
ctttggaccgtgtgtcaagttaaa

SEQ ID NO: 3726 - DNA, 24 bp, Homo sapiens
aagtctgcaccttctacccacggt

SEQ ID NO: 3727 - DNA, 24 bp, Homo sapiens
ttgtccccaacttacttagtgatc

SEQ ID NO: 3728 - DNA, 24 bp, Homo sapiens
tcagagctatcggacactttttgt

SEQ ID NO: 3729 - DNA, 24 bp, Homo sapiens
cagagctatcggacactttttgtg

SEQ ID NO: 3730 - DNA, 24 bp, Homo sapiens
ctcagagctatcggacactttttg

SEQ ID NO: 3731 - DNA, 24 bp, Homo sapiens
tgtgaaagtcagggttaccgccat

SEQ ID NO: 3732 - DNA, 24 bp, Homo sapiens
ggtagtccattcttctccatccgt

SEQ ID NO: 3733 - DNA, 24 bp, Homo sapiens
agtgagactgtttcccgccacaac

SEQ ID NO: 3734 - DNA, 24 bp, Homo sapiens
cgaccttagacactccaccaatgt

SEQ ID NO: 3735 - DNA, 25 bp, Homo sapiens
accgaaaccagattggtcccagaga

SEQ ID NO: 3736 - DNA, 25 bp, Homo sapiens
cgtggttgtctgaaattattgaagt

SEQ ID NO: 3737 - DNA, 24 bp, Homo sapiens
attttgtaaatggaaacgtcgaag

SEQ ID NO: 3738 - DNA, 24 bp, Homo sapiens
ttttgtaaatggaaacgtcgaaga

SEQ ID NO: 3739 - DNA, 24 bp, Homo sapiens
aattttgtaaatggaaacgtcgaa

SEQ ID NO: 3740 - DNA, 24 bp, Homo sapiens
ggttcggtagtggacgtttgtatc

SEQ ID NO: 3741 - DNA, 24 bp, Homo sapiens
gttcggtagtggacgtttgtatcg

SEQ ID NO: 3742 - DNA, 24 bp, Homo sapiens
aggttcggtagtggacgtttgtat

SEQ ID NO: 3743 - DNA, 24 bp, Homo sapiens
gtccatatctcgggtgccagtagt

SEQ ID NO: 3744 - DNA, 24 bp, Homo sapiens
catcctccgtgcttaacctctcca

SEQ ID NO: 3745 - DNA, 24 bp, Homo sapiens
tcggcacactgtaagttctactca

SEQ ID NO: 3746 - DNA, 24 bp, Homo sapiens
ccagtaaaaccgaagtcgatgaac

SEQ ID NO: 3747 - DNA, 24 bp, Homo sapiens
cagtaaaaccgaagtcgatgaaca

SEQ ID NO: 3748 - DNA, 24 bp, Homo sapiens
tccagtaaaaccgaagtcgatgaa

SEQ ID NO: 3749 - DNA, 24 bp, Homo sapiens
aagaacgttttcgacaaagaccga

SEQ ID NO: 3750 - DNA, 24 bp, Homo sapiens
agaacgttttcgacaaagaccgaa

SEQ ID NO: 3751 - DNA, 24 bp, Homo sapiens
gaagaacgttttcgacaaagaccg

SEQ ID NO: 3752 - DNA, 25 bp, Homo sapiens
ggaggaagagtttcgaccgtaggaa

SEQ ID NO: 3753 - DNA, 24 bp, Homo sapiens
tacagaagaggttcgtatcgtcgg

SEQ ID NO: 3754 - DNA, 25 bp, Homo sapiens
aacctcctaatagattcattcgtgg

SEQ ID NO: 3755 - DNA, 25 bp, Homo sapiens
tcttcgtaaattgaatcgtcgtact

SEQ ID NO: 3756 - DNA, 25 bp, Homo sapiens
cgacaaagaccgaaaggacttcaac

SEQ ID NO: 3757 - DNA, 25 bp, Homo sapiens
cgcaagtcagtctcagaactacact

SEQ ID NO: 3758 - DNA, 24 bp, Homo sapiens
tacagaagaggttcgtatcgtcgg

SEQ ID NO: 3759 - DNA, 25 bp, Homo sapiens
cgcaagtcagtctcagaactacact

SEQ ID NO: 3760 - DNA, 24 bp, Homo sapiens
tacagaagaggttcgtatcgtcgg

SEQ ID NO: 3761 - DNA, 25 bp, Homo sapiens
aacctcctaatagattcattcgtgg

SEQ ID NO: 3762 - DNA, 24 bp, Homo sapiens
tttactctataagagaaccgacca

SEQ ID NO: 3763 - DNA, 24 bp, Homo sapiens
ttactctataagagaaccgaccac

SEQ ID NO: 3764 - DNA, 24 bp, Homo sapiens
gtttactctataagagaaccgacc

SEQ ID NO: 3765 - DNA, 24 bp, Homo sapiens
cgtggagacatgcaaccaggactt

SEQ ID NO: 3766 - DNA, 24 bp, Homo sapiens
gtggagacatgcaaccaggacttc

SEQ ID NO: 3767 - DNA, 24 bp, Homo sapiens
acgtggagacatgcaaccaggact

SEQ ID NO: 3768 - DNA, 24 bp, Homo sapiens
ttcatccggtccgaccttttgttt

SEQ ID NO: 3769 - DNA, 24 bp, Homo sapiens
tcatccggtccgaccttttgttta

SEQ ID NO: 3770 - DNA, 24 bp, Homo sapiens
gttcatccggtccgaccttttgtt

SEQ ID NO: 3771 - DNA, 23 bp, Homo sapiens
gacatccggtctgcacacgagtg

SEQ ID NO: 3772 - DNA, 25 bp, Homo sapiens
ctaccacagaagtacagagtctccg

SEQ ID NO: 3773 - DNA, 23 bp, Homo sapiens
cagtctgtcgacgtcacaagcca

SEQ ID NO: 3774 - DNA, 25 bp, Homo sapiens
taccttgacgtggagacatgcaacc

SEQ ID NO: 3775 - DNA, 25 bp, Homo sapiens
tcgtaaccacggaacagttcgtagt

SEQ ID NO: 3776 - DNA, 25 bp, Homo sapiens
tgtcgccgttatgggaagtaaagga

SEQ ID NO: 3777 - DNA, 25 bp, Homo sapiens
tccgcaagacgctagtagttccttc

SEQ ID NO: 3778 - DNA, 23 bp, Homo sapiens
taagagaaccgaccacgccaagt

SEQ ID NO: 3779 - DNA, 25 bp, Homo sapiens
gcacacgagtggttggatatgttcc

SEQ ID NO: 3780 - DNA, 25 bp, Homo sapiens
taccttgacgtggagacatgcaacc

SEQ ID NO: 3781 - DNA, 25 bp, Homo sapiens
tcgtaaccacggaacagttcgtagt

SEQ ID NO: 3782 - DNA, 25 bp, Homo sapiens
tcgccgttatgggaagtaaaggaga

SEQ ID NO: 3783 - DNA, 25 bp, Homo sapiens
gcttaactggaaaccattgtagata

SEQ ID NO: 3784 - DNA, 23 bp, Homo sapiens
gatatgttcccagtcccgtcagg

SEQ ID NO: 3785 - DNA, 25 bp, Homo sapiens
tcccaccattcagttctaaatacca

SEQ ID NO: 3786 - DNA, 25 bp, Homo sapiens
cacggaacagttcgtagttaagtac

SEQ ID NO: 3787 - DNA, 25 bp, Homo sapiens
ggtgaaccgtgcttacataaatagt

SEQ ID NO: 3788 - DNA, 24 bp, Homo sapiens
gagaagttttcccggtcctttcaa

SEQ ID NO: 3789 - DNA, 24 bp, Homo sapiens
agaagttttcccggtcctttcaac

SEQ ID NO: 3790 - DNA, 24 bp, Homo sapiens
ggagaagttttcccggtcctttca

SEQ ID NO: 3791 - DNA, 25 bp, Homo sapiens
tcccaccattcagttctaaatacca

SEQ ID NO: 3792 - DNA, 25 bp, Homo sapiens
ccacggaacagttcgtagttaagta

SEQ ID NO: 3793 - DNA, 25 bp, Homo sapiens
ggtgaaccgtgcttacataaatagt

SEQ ID NO: 3794 - DNA, 24 bp, Homo sapiens
caggacttcctcctatccaactaa

SEQ ID NO: 3795 - DNA, 24 bp, Homo sapiens
acatggtaccttgacgtggagaca

SEQ ID NO: 3796 - DNA, 25 bp, Homo sapiens
cacggaacagttcgtagttaagtac

SEQ ID NO: 3797 - DNA, 24 bp, Homo sapiens
acagacacactcgaagaagtcccg

SEQ ID NO: 3798 - DNA, 24 bp, Homo sapiens
acgatggtcaatgtgaacgacgac

SEQ ID NO: 3799 - DNA, 24 bp, Homo sapiens
aaggtcggtcggtccagaagatcc

SEQ ID NO: 3800 - DNA, 24 bp, Homo sapiens
gaccaacactagacgtccgataaa

SEQ ID NO: 3801 - DNA, 24 bp, Homo sapiens
accaacactagacgtccgataaaa

SEQ ID NO: 3802 - DNA, 24 bp, Homo sapiens
agaccaacactagacgtccgataa

SEQ ID NO: 3803 - DNA, 24 bp, Homo sapiens
ggttgtacctcggatacctccttc

SEQ ID NO: 3804 - DNA, 24 bp, Homo sapiens
gttgtacctcggatacctccttca

SEQ ID NO: 3805 - DNA, 24 bp, Homo sapiens
cggttgtacctcggatacctcctt

SEQ ID NO: 3806 - DNA, 24 bp, Homo sapiens
tggtcgttagtggacgtgctagga

SEQ ID NO: 3807 - DNA, 24 bp, Homo sapiens
ggtcgttagtggacgtgctaggac

SEQ ID NO: 3808 - DNA, 24 bp, Homo sapiens
gtggtcgttagtggacgtgctagg

SEQ ID NO: 3809 - DNA, 24 bp, Homo sapiens
agacgagaaatggaaaagaagtcg

SEQ ID NO: 3810 - DNA, 24 bp, Homo sapiens
gacgagaaatggaaaagaagtcga

SEQ ID NO: 3811 - DNA, 24 bp, Homo sapiens
cagacgagaaatggaaaagaagtc

SEQ ID NO: 3812 - DNA, 24 bp, Homo sapiens
ggtttgacacaggacccggtagtt

SEQ ID NO: 3813 - DNA, 24 bp, Homo sapiens
gtttgacacaggacccggtagttt

SEQ ID NO: 3814 - DNA, 24 bp, Homo sapiens
cggtttgacacaggacccggtagt

SEQ ID NO: 3815 - DNA, 25 bp, Homo sapiens
agaacaggcagtaaggcgaaaggtg

SEQ ID NO: 3816 - DNA, 24 bp, Homo sapiens
ggaatacttgtctcgtcgggcgtt

SEQ ID NO: 3817 - DNA, 24 bp, Homo sapiens
agacggtaggagaggacgatgtcg

SEQ ID NO: 3818 - DNA, 24 bp, Homo sapiens
agcaaagtgtggacgcaaaggagc

SEQ ID NO: 3819 - DNA, 24 bp, Homo sapiens
agaccgtcgtttgggcaacacttt

SEQ ID NO: 3820 - DNA, 24 bp, Homo sapiens
caccacctgaacgggcttagatgc

SEQ ID NO: 3821 - DNA, 24 bp, Homo sapiens
gggaaagggtagagtcgtcggaga

SEQ ID NO: 3822 - DNA, 24 bp, Homo sapiens
agaccgtcgtttgggcaacacttt

SEQ ID NO: 3823 - DNA, 24 bp, Homo sapiens
caccacctgaacgggcttagatgc

SEQ ID NO: 3824 - DNA, 24 bp, Homo sapiens
ggtggcgtaaacatctagtctacc

SEQ ID NO: 3825 - DNA, 24 bp, Homo sapiens
cccgagtttacgacttacaggtga

SEQ ID NO: 3826 - DNA, 23 bp, Homo sapiens
actccctgccgaacccgtcactg

SEQ ID NO: 3827 - DNA, 24 bp, Homo sapiens
gtagcggtcaaaagcagtcctcta

SEQ ID NO: 3828 - DNA, 24 bp, Homo sapiens
tagcggtcaaaagcagtcctctag

SEQ ID NO: 3829 - DNA, 24 bp, Homo sapiens
ggtagcggtcaaaagcagtcctct

SEQ ID NO: 3830 - DNA, 23 bp, Homo sapiens
ctgaggaaggacctatccagacg

SEQ ID NO: 3831 - DNA, 25 bp, Homo sapiens
ggaaagacagtagaaacagagccct

SEQ ID NO: 3832 - DNA, 25 bp, Homo sapiens
tgtgtgggagtggttagtctcgtta

SEQ ID NO: 3833 - DNA, 24 bp, Homo sapiens
ggaggaacttgagacgccagacca

SEQ ID NO: 3834 - DNA, 24 bp, Homo sapiens
gaggaacttgagacgccagaccag

SEQ ID NO: 3835 - DNA, 24 bp, Homo sapiens
cggaggaacttgagacgccagacc

SEQ ID NO: 3836 - DNA, 24 bp, Homo sapiens
cggagtgtttgcgaagtatcaact

SEQ ID NO: 3837 - DNA, 24 bp, Homo sapiens
ggagtgtttgcgaagtatcaacta

SEQ ID NO: 3838 - DNA, 24 bp, Homo sapiens
acggagtgtttgcgaagtatcaac

SEQ ID NO: 3839 - DNA, 23 bp, Homo sapiens
cgccagaccagaagccacttcag

SEQ ID NO: 3840 - DNA, 25 bp, Homo sapiens
tacccgtctttcacgagtttcaggt

SEQ ID NO: 3841 - DNA, 23 bp, Homo sapiens
ccaggaacaagaaccggtgacag

SEQ ID NO: 3842 - DNA, 25 bp, Homo sapiens
gaggccctggaaaaggacgtcatta

SEQ ID NO: 3843 - DNA, 23 bp, Homo sapiens
gtagaactgacgagtcgagaggc

SEQ ID NO: 3844 - DNA, 23 bp, Homo sapiens
ctggaactcgtggagccgcaacc

SEQ ID NO: 3845 - DNA, 25 bp, Homo sapiens
caggtcgtggaagtgtaagtagagt

SEQ ID NO: 3846 - DNA, 23 bp, Homo sapiens
ccacgggaccaggaacaagaacc

SEQ ID NO: 3847 - DNA, 23 bp, Homo sapiens
gccagaccagaagccacttcagt

SEQ ID NO: 3848 - DNA, 24 bp, Homo sapiens
taggaaatcggagaccaacagacg

SEQ ID NO: 3849 - DNA, 24 bp, Homo sapiens
actgacggttaataccaggtgacc

SEQ ID NO: 3850 - DNA, 24 bp, Homo sapiens
tctattctcccgtaaaccgtccta

SEQ ID NO: 3851 - DNA, 24 bp, Homo sapiens
aacatagtacatcgacacggaagt

SEQ ID NO: 3852 - DNA, 24 bp, Homo sapiens
tttagaaagaacagagacccaccg

SEQ ID NO: 3853 - DNA, 24 bp, Homo sapiens
taggaaatcggagaccaacagacg

SEQ ID NO: 3854 - DNA, 24 bp, Homo sapiens
gtctcgctgggtcgttccttagta

SEQ ID NO: 3855 - DNA, 24 bp, Homo sapiens
aagatcggacgacgacattccaaa

SEQ ID NO: 3856 - DNA, 24 bp, Homo sapiens
aacatagtacatcgacacggaagt

SEQ ID NO: 3857 - DNA, 24 bp, Homo sapiens
gtctcgctgggtcgttccttagta

SEQ ID NO: 3858 - DNA, 24 bp, Homo sapiens
tttagaaagaacagagacccaccg

SEQ ID NO: 3859 - DNA, 24 bp, Homo sapiens
taggaaatcggagaccaacagacg

SEQ ID NO: 3860 - DNA, 24 bp, Homo sapiens
gtctcgctgggtcgttccttagta

SEQ ID NO: 3861 - DNA, 24 bp, Homo sapiens
aaagatcggacgacgacattccaa

SEQ ID NO: 3862 - DNA, 24 bp, Homo sapiens
aacatagtacatcgacacggaagt

SEQ ID NO: 3863 - DNA, 24 bp, Homo sapiens
aagttttaaaaagacattctaccc

SEQ ID NO: 3864 - DNA, 24 bp, Homo sapiens
agttttaaaaagacattctacccg

SEQ ID NO: 3865 - DNA, 24 bp, Homo sapiens
aaagttttaaaaagacattctacc

SEQ ID NO: 3866 - DNA, 24 bp, Homo sapiens
acggacctgaacggttgacattcc

SEQ ID NO: 3867 - DNA, 24 bp, Homo sapiens
ccaattacagacttcagggacatg

SEQ ID NO: 3868 - DNA, 24 bp, Homo sapiens
tggaacgactcatgacggacttaa

SEQ ID NO: 3869 - DNA, 24 bp, Homo sapiens
gaggtgtgtgagtcggtgtctctc

SEQ ID NO: 3870 - DNA, 24 bp, Homo sapiens
ggcttaaaggaggagaaacacacc

SEQ ID NO: 3871 - DNA, 24 bp, Homo sapiens
agtagagaagaacagtcgtcccgt

SEQ ID NO: 3872 - DNA, 24 bp, Homo sapiens
agtagagaagaacagtcgtcccgt

SEQ ID NO: 3873 - DNA, 24 bp, Homo sapiens
gctctttagacagctcggttccgt

SEQ ID NO: 3874 - DNA, 24 bp, Homo sapiens
ggcttaaaggaggagaaacacacc

SEQ ID NO: 3875 - DNA, 24 bp, Homo sapiens
agtagagaagaacagtcgtcccgt

SEQ ID NO: 3876 - DNA, 24 bp, Homo sapiens
gatcggacgaccttctcacaaacg

SEQ ID NO: 3877 - DNA, 24 bp, Homo sapiens
tagacaaactgagacttttcaatc

SEQ ID NO: 3878 - DNA, 24 bp, Homo sapiens
agacaaactgagacttttcaatcg

SEQ ID NO: 3879 - DNA, 24 bp, Homo sapiens
gtagacaaactgagacttttcaat

SEQ ID NO: 3880 - DNA, 24 bp, Homo sapiens
gattctggaacggaaacctcgtat

SEQ ID NO: 3881 - DNA, 24 bp, Homo sapiens
attctggaacggaaacctcgtata

SEQ ID NO: 3882 - DNA, 24 bp, Homo sapiens
agattctggaacggaaacctcgta

SEQ ID NO: 3883 - DNA, 25 bp, Homo sapiens
cgttggtttccgagtatgagataag

SEQ ID NO: 3884 - DNA, 25 bp, Homo sapiens
tgactatggtactgttccactcacg

SEQ ID NO: 3885 - DNA, 23 bp, Homo sapiens
aacacctccgacgaagaacctga

SEQ ID NO: 3886 - DNA, 25 bp, Homo sapiens
tcagacataccaagaggaggacggc

SEQ ID NO: 3887 - DNA, 25 bp, Homo sapiens
cgttggtttccgagtatgagataag

SEQ ID NO: 3888 - DNA, 25 bp, Homo sapiens
gttccactcacgtaagaagacaggt

SEQ ID NO: 3889 - DNA, 24 bp, Homo sapiens
aaggggtggaggtttctgttgacg

SEQ ID NO: 3890 - DNA, 25 bp, Homo sapiens
tccagacactcaaacaataaggaca

SEQ ID NO: 3891 - DNA, 25 bp, Homo sapiens
aactgacttaggtaaagaagactgt

SEQ ID NO: 3892 - DNA, 24 bp, Homo sapiens
agtagttgactgtgcggaacactt

SEQ ID NO: 3893 - DNA, 25 bp, Homo sapiens
tagacgaacgagactaagacacagt

SEQ ID NO: 3894 - DNA, 25 bp, Homo sapiens
tgaaccgttaaatcaaccactttcg

SEQ ID NO: 3895 - DNA, 25 bp, Homo sapiens
gtcagtccttaattccagacactca

SEQ ID NO: 3896 - DNA, 25 bp, Homo sapiens
gtggcggttaggttaaagacgaagt

SEQ ID NO: 3897 - DNA, 25 bp, Homo sapiens
ccgaaccaggacctcaacaacagaa

SEQ ID NO: 3898 - DNA, 24 bp, Homo sapiens
tggtaggttgaacaggtaacatcg

SEQ ID NO: 3899 - DNA, 24 bp, Homo sapiens
tccaataactgctgacgacgatta

SEQ ID NO: 3900 - DNA, 24 bp, Homo sapiens
tctcggacatggtgtacgttgtga

SEQ ID NO: 3901 - DNA, 24 bp, Homo sapiens
tcgcccgtacaactccagtatctc

SEQ ID NO: 3902 - DNA, 24 bp, Homo sapiens
tggtaggttgaacaggtaacatcg

SEQ ID NO: 3903 - DNA, 24 bp, Homo sapiens
accagtgggtttcctgacagtgga

SEQ ID NO: 3904 - DNA, 24 bp, Homo sapiens
gtcccgagacccaataaagacagg

SEQ ID NO: 3905 - DNA, 24 bp, Homo sapiens
ggtggtggccgtactgcctgaggt

SEQ ID NO: 3906 - DNA, 24 bp, Homo sapiens
gtggtggccgtactgcctgaggtg

SEQ ID NO: 3907 - DNA, 24 bp, Homo sapiens
tggtggtggccgtactgcctgagg

SEQ ID NO: 3908 - DNA, 24 bp, Homo sapiens
gtacccggtacagactgtcgttag

SEQ ID NO: 3909 - DNA, 24 bp, Homo sapiens
tacccggtacagactgtcgttaga

SEQ ID NO: 3910 - DNA, 24 bp, Homo sapiens
agtacccggtacagactgtcgtta

SEQ ID NO: 3911 - DNA, 24 bp, Homo sapiens
agacctgaagaaaagttgatacgg

SEQ ID NO: 3912 - DNA, 24 bp, Homo sapiens
cggtagtggaacaagtaggtcagg

SEQ ID NO: 3913 - DNA, 24 bp, Homo sapiens
ggcagtgggtctcgtgtttagcat

SEQ ID NO: 3914 - DNA, 24 bp, Homo sapiens
gctttcaccgcctagtctgggacg

SEQ ID NO: 3915 - DNA, 24 bp, Homo sapiens
aaacgacaggtagacaccagaaga

SEQ ID NO: 3916 - DNA, 24 bp, Homo sapiens
aacgacaggtagacaccagaagag

SEQ ID NO: 3917 - DNA, 24 bp, Homo sapiens
taaacgacaggtagacaccagaag

SEQ ID NO: 3918 - DNA, 24 bp, Homo sapiens
gtttaggtacagggaactgtcgtg

SEQ ID NO: 3919 - DNA, 24 bp, Homo sapiens
tttaggtacagggaactgtcgtgt

SEQ ID NO: 3920 - DNA, 24 bp, Homo sapiens
agtttaggtacagggaactgtcgt

SEQ ID NO: 3921 - DNA, 24 bp, Homo sapiens
cattgaccaatcatttacggagga

SEQ ID NO: 3922 - DNA, 24 bp, Homo sapiens
attgaccaatcatttacggaggag

SEQ ID NO: 3923 - DNA, 24 bp, Homo sapiens
ccattgaccaatcatttacggagg

SEQ ID NO: 3924 - DNA, 24 bp, Homo sapiens
aggtggttaagggaaaagaggaaa

SEQ ID NO: 3925 - DNA, 24 bp, Homo sapiens
aagtgaatcaggtagacatcgaca

SEQ ID NO: 3926 - DNA, 24 bp, Homo sapiens
agacatcgacactgacgaggtggt

SEQ ID NO: 3927 - DNA, 24 bp, Homo sapiens
cgaaaggtagtggacgtaggtggg

SEQ ID NO: 3928 - DNA, 24 bp, Homo sapiens
gaaaggtagtggacgtaggtgggt

SEQ ID NO: 3929 - DNA, 24 bp, Homo sapiens
tcgaaaggtagtggacgtaggtgg

SEQ ID NO: 3930 - DNA, 24 bp, Homo sapiens
tgcgaccttatggattcctctctt

SEQ ID NO: 3931 - DNA, 24 bp, Homo sapiens
gcgaccttatggattcctctcttt

SEQ ID NO: 3932 - DNA, 24 bp, Homo sapiens
ctgcgaccttatggattcctctct

SEQ ID NO: 3933 - DNA, 24 bp, Homo sapiens
gcacctggtatggacgccttagca

SEQ ID NO: 3934 - DNA, 24 bp, Homo sapiens
cacctggtatggacgccttagcac

SEQ ID NO: 3935 - DNA, 24 bp, Homo sapiens
tgcacctggtatggacgccttagc

SEQ ID NO: 3936 - DNA, 24 bp, Homo sapiens
ggaactacctccaactcgacttcg

SEQ ID NO: 3937 - DNA, 24 bp, Homo sapiens
gaactacctccaactcgacttcga

SEQ ID NO: 3938 - DNA, 24 bp, Homo sapiens
gggaactacctccaactcgacttc

SEQ ID NO: 3939 - DNA, 25 bp, Homo sapiens
gaaggtatgaacttagtagtagtct

SEQ ID NO: 3940 - DNA, 25 bp, Homo sapiens
agatgacgagccgcttctaatagtt

SEQ ID NO: 3941 - DNA, 25 bp, Homo sapiens
gtgtgagactagactaagcgttcaa

SEQ ID NO: 3942 - DNA, 25 bp, Homo sapiens
ggtcgtagtaatcgtggaggaatgt

SEQ ID NO: 3943 - DNA, 25 bp, Homo sapiens
agatgacgagccgcttctaatagtt

SEQ ID NO: 3944 - DNA, 25 bp, Homo sapiens
cgtcatctcggacatactactcgga

SEQ ID NO: 3945 - DNA, 24 bp, Homo sapiens
ccgttctgacccgcccacaataaa

SEQ ID NO: 3946 - DNA, 24 bp, Homo sapiens
tcacaaatagaggtcagcatctgc

SEQ ID NO: 3947 - DNA, 25 bp, Homo sapiens
cccacggaacaaaatcaccctgaaa

SEQ ID NO: 3948 - DNA, 25 bp, Homo sapiens
agatgacgagccgcttctaatagtt

SEQ ID NO: 3949 - DNA, 25 bp, Homo sapiens
tcacggaacttaccaggagaatcta

SEQ ID NO: 3950 - DNA, 25 bp, Homo sapiens
agatgacgagccgcttctaatagtt

SEQ ID NO: 3951 - DNA, 24 bp, Homo sapiens
ctacctgaaccttagtgtaccgca

SEQ ID NO: 3952 - DNA, 23 bp, Homo sapiens
gacaacgacgacgacgacgacaa

SEQ ID NO: 3953 - DNA, 25 bp, Homo sapiens
tggacactttccgtgagacacactt

SEQ ID NO: 3954 - DNA, 25 bp, Homo sapiens
tccaatgatacacctgagactgctg

SEQ ID NO: 3955 - DNA, 24 bp, Homo sapiens
cctcaaccaagtggaaccgcaaga

SEQ ID NO: 3956 - DNA, 24 bp, Homo sapiens
agccataggtcctcgacgtgcaac

SEQ ID NO: 3957 - DNA, 24 bp, Homo sapiens
accaccaaacaaagaggagtccac

SEQ ID NO: 3958 - DNA, 25 bp, Homo sapiens
cagaagatagttcagaagaagagga

SEQ ID NO: 3959 - DNA, 25 bp, Homo sapiens
cgaggatatggaccagggtaagata

SEQ ID NO: 3960 - DNA, 23 bp, Homo sapiens
aggcgaagggtaacctgggctat

SEQ ID NO: 3961 - DNA, 25 bp, Homo sapiens
agaccaacggaaacctcggataaga

SEQ ID NO: 3962 - DNA, 25 bp, Homo sapiens
cgaggatatggaccagggtaagata

SEQ ID NO: 3963 - DNA, 24 bp, Homo sapiens
ggcgaagggtaacctgggctattt

SEQ ID NO: 3964 - DNA, 25 bp, Homo sapiens
caacggaaacctcggataagagaga

SEQ ID NO: 3965 - DNA, 24 bp, Homo sapiens
agaggaaccttcgacgtcttctcc

SEQ ID NO: 3966 - DNA, 24 bp, Homo sapiens
gaggaaccttcgacgtcttctccg

SEQ ID NO: 3967 - DNA, 24 bp, Homo sapiens
gagaggaaccttcgacgtcttctc

SEQ ID NO: 3968 - DNA, 25 bp, Homo sapiens
ggaccactatagaaagtttcaacgg

SEQ ID NO: 3969 - DNA, 25 bp, Homo sapiens
acgacggcgatggtaaaagtatctg

SEQ ID NO: 3970 - DNA, 23 bp, Homo sapiens
aagtcgagagagagtcgagcccg

SEQ ID NO: 3971 - DNA, 25 bp, Homo sapiens
tccaaccaaactcagtcataaccgt

SEQ ID NO: 3972 - DNA, 25 bp, Homo sapiens
acgaattacctgtaaccatacttcc

SEQ ID NO: 3973 - DNA, 25 bp, Homo sapiens
actgtcgtggtgataggtagggtta

SEQ ID NO: 3974 - DNA, 23 bp, Homo sapiens
tccaaccgtggaacatcgtggtg

SEQ ID NO: 3975 - DNA, 23 bp, Homo sapiens
cgacgcgtggaatgtggactaca

SEQ ID NO: 3976 - DNA, 25 bp, Homo sapiens
ttatacttcatcggtacgaccaatt

SEQ ID NO: 3977 - DNA, 25 bp, Homo sapiens
ttccagaagttcgtagagtcggtct

SEQ ID NO: 3978 - DNA, 24 bp, Homo sapiens
tggaagaagtggtcaccgtagaac

SEQ ID NO: 3979 - DNA, 25 bp, Homo sapiens
gacctccgtttctatcatctctgtg

SEQ ID NO: 3980 - DNA, 23 bp, Homo sapiens
aaagcgacccaccgaagagcgtc

SEQ ID NO: 3981 - DNA, 25 bp, Homo sapiens
gacaaccaacattcgttcaaggaca

SEQ ID NO: 3982 - DNA, 25 bp, Homo sapiens
aaggtttgtaacttcccgtgtttca

SEQ ID NO: 3983 - DNA, 24 bp, Homo sapiens
gtcgtcaggtaaggtccagcagtg

SEQ ID NO: 3984 - DNA, 25 bp, Homo sapiens
tcagaccttcagttcaacctacgcc

SEQ ID NO: 3985 - DNA, 25 bp, Homo sapiens
acgactacgagtacctacgatgacg

SEQ ID NO: 3986 - DNA, 25 bp, Homo sapiens
cacctgtatccaccgtagtgtgagg

SEQ ID NO: 3987 - DNA, 24 bp, Homo sapiens
ctggaaggtcatgtcggtgtggtt

SEQ ID NO: 3988 - DNA, 24 bp, Homo sapiens
aggtcggtagtacaggaggatgcc

SEQ ID NO: 3989 - DNA, 24 bp, Homo sapiens
ctaacacctaatcgaggctcaccg

SEQ ID NO: 3990 - DNA, 24 bp, Homo sapiens
cgccagacatcggtcgtagtgaag

SEQ ID NO: 3991 - DNA, 24 bp, Homo sapiens
acgaacctttggataactaacacc

SEQ ID NO: 3992 - DNA, 24 bp, Homo sapiens
atgttaagtagggacctggtgacg

SEQ ID NO: 3993 - DNA, 24 bp, Homo sapiens
tgttaagtagggacctggtgacga

SEQ ID NO: 3994 - DNA, 24 bp, Homo sapiens
aatgttaagtagggacctggtgac

SEQ ID NO: 3995 - DNA, 24 bp, Homo sapiens
tcgataggttaggagtgaagggta

SEQ ID NO: 3996 - DNA, 24 bp, Homo sapiens
cgataggttaggagtgaagggtat

SEQ ID NO: 3997 - DNA, 24 bp, Homo sapiens
ttcgataggttaggagtgaagggt

SEQ ID NO: 3998 - DNA, 24 bp, Homo sapiens
tgagggacaaaacaagaaccgacg

SEQ ID NO: 3999 - DNA, 25 bp, Homo sapiens
taggaatagaaataacgacaatcgc

SEQ ID NO: 4000 - DNA, 25 bp, Homo sapiens
ttccatgaaatttggtgaaagagag

SEQ ID NO: 4001 - DNA, 23 bp, Homo sapiens
acctacgaccctaaagtggacgg

SEQ ID NO: 4002 - DNA, 25 bp, Homo sapiens
aggttaggagtgaagggtatctgac

SEQ ID NO: 4003 - DNA, 25 bp, Homo sapiens
gcagaccacaccgatatgttcaact

SEQ ID NO: 4004 - DNA, 25 bp, Homo sapiens
tcctgttgtggtcgaatcacctacg

SEQ ID NO: 4005 - DNA, 25 bp, Homo sapiens
gcagaccacaccgatatgttcaact

SEQ ID NO: 4006 - DNA, 25 bp, Homo sapiens
gaaacggactttgctcaacggaact

SEQ ID NO: 4007 - DNA, 23 bp, Homo sapiens
caggttgctcggtcttgaagaag

SEQ ID NO: 4008 - DNA, 23 bp, Homo sapiens
gttagaaccgtcccattatcgct

SEQ ID NO: 4009 - DNA, 25 bp, Homo sapiens
tggttgtagaacgggaggagtatca

SEQ ID NO: 4010 - DNA, 25 bp, Homo sapiens
aaagaatcacgaccagagagttccc

SEQ ID NO: 4011 - DNA, 24 bp, Homo sapiens
acaggttgctcggtcttgaagaag

SEQ ID NO: 4012 - DNA, 25 bp, Homo sapiens
tagaaccgtcccattatcgctgtca

SEQ ID NO: 4013 - DNA, 25 bp, Homo sapiens
cgtaggagcccgtaccgaaattaca

SEQ ID NO: 4014 - DNA, 25 bp, Homo sapiens
tcctgttgtggtcgaatcacctacg

SEQ ID NO: 4015 - DNA, 25 bp, Homo sapiens
tagaaccgtcccattatcgctgtca

SEQ ID NO: 4016 - DNA, 24 bp, Homo sapiens
gcgaccaagctccaaatgagggac

SEQ ID NO: 4017 - DNA, 25 bp, Homo sapiens
tggtgaaagagagtagaaataggaa

SEQ ID NO: 4018 - DNA, 25 bp, Homo sapiens
ggaagaagagatgcagaccacaccg

SEQ ID NO: 4019 - DNA, 25 bp, Homo sapiens
tgaaactccaaatccactttagcgg

SEQ ID NO: 4020 - DNA, 25 bp, Homo sapiens
acaaccgtcttgacgattacagtcg

SEQ ID NO: 4021 - DNA, 25 bp, Homo sapiens
agaagaagaggcgagtgatacgaac

SEQ ID NO: 4022 - DNA, 25 bp, Homo sapiens
gaactcctcagtccaccgtatatcg

SEQ ID NO: 4023 - DNA, 25 bp, Homo sapiens
tggtggttgtctttacccagcaagt

SEQ ID NO: 4024 - DNA, 25 bp, Homo sapiens
tgttgaggtttaggagggagagggt

SEQ ID NO: 4025 - DNA, 25 bp, Homo sapiens
caggacaaaggtttccttaagggtg

SEQ ID NO: 4026 - DNA, 24 bp, Homo sapiens
gacgaggtctattgacttaccgaa

SEQ ID NO: 4027 - DNA, 24 bp, Homo sapiens
acgattttccctgacatcgaagta

SEQ ID NO: 4028 - DNA, 24 bp, Homo sapiens
cgattttccctgacatcgaagtat

SEQ ID NO: 4029 - DNA, 24 bp, Homo sapiens
aacgattttccctgacatcgaagt

SEQ ID NO: 4030 - DNA, 24 bp, Homo sapiens
acccttcgtacggtaaattctgaa

SEQ ID NO: 4031 - DNA, 24 bp, Homo sapiens
cccttcgtacggtaaattctgaaa

SEQ ID NO: 4032 - DNA, 24 bp, Homo sapiens
aacccttcgtacggtaaattctga

SEQ ID NO: 4033 - DNA, 23 bp, Homo sapiens
agaaaccgttcacatagacagtg

SEQ ID NO: 4034 - DNA, 24 bp, Homo sapiens
tttagacttgtggaacgttagcaa

SEQ ID NO: 4035 - DNA, 24 bp, Homo sapiens
ttagacttgtggaacgttagcaac

SEQ ID NO: 4036 - DNA, 24 bp, Homo sapiens
ttttagacttgtggaacgttagca

SEQ ID NO: 4037 - DNA, 24 bp, Homo sapiens
aaagctatgcgtacaacttgggcg

SEQ ID NO: 4038 - DNA, 24 bp, Homo sapiens
gcttgtagtacggcacaggtccta

SEQ ID NO: 4039 - DNA, 25 bp, Homo sapiens
acgaaaccaggtggattgaaacgct

SEQ ID NO: 4040 - DNA, 25 bp, Homo sapiens
acctacaaaacgaactgaagaaact

SEQ ID NO: 4041 - DNA, 24 bp, Homo sapiens
tagatccgtgtggttctctcttcg

SEQ ID NO: 4042 - DNA, 24 bp, Homo sapiens
agatccgtgtggttctctcttcga

SEQ ID NO: 4043 - DNA, 24 bp, Homo sapiens
ttagatccgtgtggttctctcttc

SEQ ID NO: 4044 - DNA, 24 bp, Homo sapiens
tcgacgtcgtaggagacggtgaga

SEQ ID NO: 4045 - DNA, 24 bp, Homo sapiens
cgacgtcgtaggagacggtgagaa

SEQ ID NO: 4046 - DNA, 24 bp, Homo sapiens
gtcgacgtcgtaggagacggtgag

SEQ ID NO: 4047 - DNA, 25 bp, Homo sapiens
gtgtagaacttcacttacgagaaga

SEQ ID NO: 4048 - DNA, 25 bp, Homo sapiens
aaccaccttctcgacaactacatga

SEQ ID NO: 4049 - DNA, 25 bp, Homo sapiens
cgttggtaacaaagacgatttaggt

SEQ ID NO: 4050 - DNA, 25 bp, Homo sapiens
gtaggagacggtgagaaagacgaca

SEQ ID NO: 4051 - DNA, 25 bp, Homo sapiens
aaccaccttctcgacaactacatga

SEQ ID NO: 4052 - DNA, 24 bp, Homo sapiens
tgctcctacaccttaacggaacgg

SEQ ID NO: 4053 - DNA, 25 bp, Homo sapiens
acgagaagaacatcggatgagactt

SEQ ID NO: 4054 - DNA, 25 bp, Homo sapiens
aaccaccttctcgacaactacatga

SEQ ID NO: 4055 - DNA, 24 bp, Homo sapiens
tgctcctacaccttaacggaacgg

SEQ ID NO: 4056 - DNA, 25 bp, Homo sapiens
aaccaccttctcgacaactacatga

SEQ ID NO: 4057 - DNA, 24 bp, Homo sapiens
tgctcctacaccttaacggaacgg

SEQ ID NO: 4058 - DNA, 25 bp, Homo sapiens
tctaagtaccaactgttcacgacgg

SEQ ID NO: 4059 - DNA, 24 bp, Homo sapiens
cctacctctaggttcctgtcctca

SEQ ID NO: 4060 - DNA, 24 bp, Homo sapiens
ctacctctaggttcctgtcctcac

SEQ ID NO: 4061 - DNA, 24 bp, Homo sapiens
acctacctctaggttcctgtcctc

SEQ ID NO: 4062 - DNA, 25 bp, Homo sapiens
agaacccatccagacctaccaaagt

SEQ ID NO: 4063 - DNA, 23 bp, Homo sapiens
ccattggtgactccgttggctaa

SEQ ID NO: 4064 - DNA, 25 bp, Homo sapiens
tctcagatcagagttagacgacagt

SEQ ID NO: 4065 - DNA, 25 bp, Homo sapiens
actctgatgtgttattgaccactcg

SEQ ID NO: 4066 - DNA, 25 bp, Homo sapiens
agaacccatccagacctaccaaagt

SEQ ID NO: 4067 - DNA, 23 bp, Homo sapiens
ccattggtgactccgttggctaa

SEQ ID NO: 4068 - DNA, 24 bp, Homo sapiens
aagaccaggtttgacgttacaatg

SEQ ID NO: 4069 - DNA, 24 bp, Homo sapiens
agaccaggtttgacgttacaatgt

SEQ ID NO: 4070 - DNA, 24 bp, Homo sapiens
aaagaccaggtttgacgttacaat

SEQ ID NO: 4071 - DNA, 25 bp, Homo sapiens
tgacttgaagaaactgccgtcccag

SEQ ID NO: 4072 - DNA, 24 bp, Homo sapiens
agaagaacggtggaagcgccggcc

SEQ ID NO: 4073 - DNA, 24 bp, Homo sapiens
gaagaacggtggaagcgccggcct

SEQ ID NO: 4074 - DNA, 24 bp, Homo sapiens
aagaagaacggtggaagcgccggc

SEQ ID NO: 4075 - DNA, 23 bp, Homo sapiens
acggtggaagcgccggcctgtac

SEQ ID NO: 4076 - DNA, 24 bp, Homo sapiens
cgaagaacccgacaaagtcaccga

SEQ ID NO: 4077 - DNA, 24 bp, Homo sapiens
ggacgaagaacccgacaaagtcac

SEQ ID NO: 4078 - DNA, 23 bp, Homo sapiens
aagacgaggagaaaaacaaagac

SEQ ID NO: 4079 - DNA, 23 bp, Homo sapiens
gccggaagcgaaaatcgaggagc

SEQ ID NO: 4080 - DNA, 23 bp, Homo sapiens
ggagacgaggttccttccagggg

SEQ ID NO: 4081 - DNA, 24 bp, Homo sapiens
tccaggtcactatgaaggacaagt

SEQ ID NO: 4082 - DNA, 24 bp, Homo sapiens
ttggactgactcttaggaaggact

SEQ ID NO: 4083 - DNA, 24 bp, Homo sapiens
cgtacatcgtgtagacaccgtaca

SEQ ID NO: 4084 - DNA, 24 bp, Homo sapiens
tccaggtcactatgaaggacaagt

SEQ ID NO: 4085 - DNA, 24 bp, Homo sapiens
ttggactgactcttaggaaggact

SEQ ID NO: 4086 - DNA, 24 bp, Homo sapiens
acacctagacgacattcggtcctt

SEQ ID NO: 4087 - DNA, 24 bp, Homo sapiens
tttagacagttggacattaacacg

SEQ ID NO: 4088 - DNA, 24 bp, Homo sapiens
ttagacagttggacattaacacga

SEQ ID NO: 4089 - DNA, 24 bp, Homo sapiens
gtttagacagttggacattaacac

SEQ ID NO: 4090 - DNA, 25 bp, Homo sapiens
tgaaccttaccaacactacagacct

SEQ ID NO: 4091 - DNA, 25 bp, Homo sapiens
tgtcctgtccattcatagactgtca

SEQ ID NO: 4092 - DNA, 25 bp, Homo sapiens
aataagttccgaaggtctgactacg

SEQ ID NO: 4093 - DNA, 25 bp, Homo sapiens
gtctactttgacatctacgtgctca

SEQ ID NO: 4094 - DNA, 24 bp, Homo sapiens
aatcgttaaggaatcgttaccgtt

SEQ ID NO: 4095 - DNA, 25 bp, Homo sapiens
tccctacaccttttagtcgtagtta

SEQ ID NO: 4096 - DNA, 25 bp, Homo sapiens
cgagtaaaggtattttagacctggg

SEQ ID NO: 4097 - DNA, 24 bp, Homo sapiens
aagttaagcaaccaactgaacgaa

SEQ ID NO: 4098 - DNA, 25 bp, Homo sapiens
cgacaaccgaccactaaactcgaaa

SEQ ID NO: 4099 - DNA, 25 bp, Homo sapiens
agtgacttacaggagagttgcgagt

SEQ ID NO: 4100 - DNA, 25 bp, Homo sapiens
gtatccgacataacgagaaggcgaa

SEQ ID NO: 4101 - DNA, 24 bp, Homo sapiens
aatcgttaaggaatcgttaccgtt

SEQ ID NO: 4102 - DNA, 24 bp, Homo sapiens
ctacagtgaatggtatcaggagta

SEQ ID NO: 4103 - DNA, 24 bp, Homo sapiens
tacagtgaatggtatcaggagtag

SEQ ID NO: 4104 - DNA, 24 bp, Homo sapiens
actacagtgaatggtatcaggagt

SEQ ID NO: 4105 - DNA, 25 bp, Homo sapiens
aggacttccgtctgatagtagttgg

SEQ ID NO: 4106 - DNA, 23 bp, Homo sapiens
aagaggacgagaaccacaactgc

SEQ ID NO: 4107 - DNA, 25 bp, Homo sapiens
cctcctgacggtctccttcctaata

SEQ ID NO: 4108 - DNA, 24 bp, Homo sapiens
gtatcgtagttggcaccagaacca

SEQ ID NO: 4109 - DNA, 24 bp, Homo sapiens
tatcgtagttggcaccagaaccac

SEQ ID NO: 4110 - DNA, 24 bp, Homo sapiens
agtatcgtagttggcaccagaacc

SEQ ID NO: 4111 - DNA, 24 bp, Homo sapiens
ctacgatgtctgggactacgtagg

SEQ ID NO: 4112 - DNA, 24 bp, Homo sapiens
tacgatgtctgggactacgtaggt

SEQ ID NO: 4113 - DNA, 24 bp, Homo sapiens
tctacgatgtctgggactacgtag

SEQ ID NO: 4114 - DNA, 25 bp, Homo sapiens
cctcatctgacaaagtaccatccct

SEQ ID NO: 4115 - DNA, 23 bp, Homo sapiens
ggtttacgaagagccatccgccc

SEQ ID NO: 4116 - DNA, 25 bp, Homo sapiens
agttgtaagacatgctcgtggtcgg

SEQ ID NO: 4117 - DNA, 23 bp, Homo sapiens
cccgtctctccgacgaggtcgta

SEQ ID NO: 4118 - DNA, 25 bp, Homo sapiens
aacttctactactaccgactcaacc

SEQ ID NO: 4119 - DNA, 24 bp, Homo sapiens
caggtcgtgctagaagtaacagac

SEQ ID NO: 4120 - DNA, 25 bp, Homo sapiens
ggaaggtagaccgtatgaaggacac

SEQ ID NO: 4121 - DNA, 25 bp, Homo sapiens
ctactaccgactcaaccgactcacc

SEQ ID NO: 4122 - DNA, 25 bp, Homo sapiens
accgtccatatcagacacctcatcc

SEQ ID NO: 4123 - DNA, 23 bp, Homo sapiens
aacatctaagacctgtcgtcacg

SEQ ID NO: 4124 - DNA, 23 bp, Homo sapiens
cgaagtaagagacggacagcagt

SEQ ID NO: 4125 - DNA, 24 bp, Homo sapiens
tacgacctaacggagagcataaag

SEQ ID NO: 4126 - DNA, 24 bp, Homo sapiens
acgacctaacggagagcataaagc

SEQ ID NO: 4127 - DNA, 24 bp, Homo sapiens
ctacgacctaacggagagcataaa

SEQ ID NO: 4128 - DNA, 24 bp, Homo sapiens
ttacgcgaaatggagagcataaag

SEQ ID NO: 4129 - DNA, 24 bp, Homo sapiens
tacgcgaaatggagagcataaagc

SEQ ID NO: 4130 - DNA, 24 bp, Homo sapiens
tttacgcgaaatggagagcataaa

SEQ ID NO: 4131 - DNA, 25 bp, Homo sapiens
aaggaagagtctgagacatccgacc

SEQ ID NO: 4132 - DNA, 24 bp, Homo sapiens
gttcaggaggttctacggaagacg

SEQ ID NO: 4133 - DNA, 24 bp, Homo sapiens
gacgacctacgacctaacggagag

SEQ ID NO: 4134 - DNA, 25 bp, Homo sapiens
aagagtctgagacatccgacccgta

SEQ ID NO: 4135 - DNA, 25 bp, Homo sapiens
attatgatgtaagtggactaatatt

SEQ ID NO: 4136 - DNA, 24 bp, Homo sapiens
gttcaggaggttctacggaagacg

SEQ ID NO: 4137 - DNA, 25 bp, Homo sapiens
gtggactaatatttaaaggaagagt

SEQ ID NO: 4138 - DNA, 24 bp, Homo sapiens
gttcaggaggttctacggaagacg

SEQ ID NO: 4139 - DNA, 25 bp, Homo sapiens
agagtagacgacctacgacctaacg

SEQ ID NO: 4140 - DNA, 24 bp, Homo sapiens
tgtgttaccgtgttgacaacgaga

SEQ ID NO: 4141 - DNA, 25 bp, Homo sapiens
tcctggatctccactttacaccaaa

SEQ ID NO: 4142 - DNA, 25 bp, Homo sapiens
ctgtcgttttgcccaagagttccac

SEQ ID NO: 4143 - DNA, 25 bp, Homo sapiens
gtggactaatatttaaaggaagagt

SEQ ID NO: 4144 - DNA, 24 bp, Homo sapiens
gttcaggaggttctacggaagacg

SEQ ID NO: 4145 - DNA, 25 bp, Homo sapiens
tctaaccagtcgtgctgtgacctaa

SEQ ID NO: 4146 - DNA, 25 bp, Homo sapiens
tcgtcatagatagtccaccgtcaga

SEQ ID NO: 4147 - DNA, 25 bp, Homo sapiens
tgattgtcgtggttgtgaattagca

SEQ ID NO: 4148 - DNA, 25 bp, Homo sapiens
aacaagattaggtgaggtctactcg

SEQ ID NO: 4149 - DNA, 23 bp, Homo sapiens
acgattgagtccaagctacacgg

SEQ ID NO: 4150 - DNA, 25 bp, Homo sapiens
tcacaacttctaaaggaccgtaaag

SEQ ID NO: 4151 - DNA, 23 bp, Homo sapiens
acgattgagtccaagctacacgg

SEQ ID NO: 4152 - DNA, 25 bp, Homo sapiens
tcacaacttctaaaggaccgtaaag

SEQ ID NO: 4153 - DNA, 25 bp, Homo sapiens
cgtagacctagtaactccaagttcc

SEQ ID NO: 4154 - DNA, 24 bp, Homo sapiens
accttcagcttacaagcgggagaa

SEQ ID NO: 4155 - DNA, 24 bp, Homo sapiens
ccttcagcttacaagcgggagaac

SEQ ID NO: 4156 - DNA, 24 bp, Homo sapiens
caccttcagcttacaagcgggaga

SEQ ID NO: 4157 - DNA, 23 bp, Homo sapiens
cgtcctgtagttgtaggtcctgg

SEQ ID NO: 4158 - DNA, 25 bp, Homo sapiens
tagaaccgcccgactacttcaatgg

SEQ ID NO: 4159 - DNA, 25 bp, Homo sapiens
aagtccaccttcagcttacaagcgg

SEQ ID NO: 4160 - DNA, 25 bp, Homo sapiens
cacctctactcaagactcgccaacc

SEQ ID NO: 4161 - DNA, 25 bp, Homo sapiens
ggctagaacttgaagcgacatgacg

SEQ ID NO: 4162 - DNA, 24 bp, Homo sapiens
aacgtcgagtgtagagcttggtac

SEQ ID NO: 4163 - DNA, 25 bp, Homo sapiens
cacctctactcaagactcgccaacc

SEQ ID NO: 4164 - DNA, 25 bp, Homo sapiens
ggctagaacttgaagcgacatgacg

SEQ ID NO: 4165 - DNA, 25 bp, Homo sapiens
ggaaggaatatagcgaccgacagaa

SEQ ID NO: 4166 - DNA, 25 bp, Homo sapiens
cggaagtagtgaagacacgagaaga

SEQ ID NO: 4167 - DNA, 23 bp, Homo sapiens
gacctccaagaccgagaccttcc

SEQ ID NO: 4168 - DNA, 24 bp, Homo sapiens
cggagaaggaggaggaggagtagg

SEQ ID NO: 4169 - DNA, 23 bp, Homo sapiens
gacctccaagaccgagaccttcc

SEQ ID NO: 4170 - DNA, 24 bp, Homo sapiens
cggagaaggaggaggaggagtagg

SEQ ID NO: 4171 - DNA, 25 bp, Homo sapiens
ttaccgtcgagaactctcctcacac

SEQ ID NO: 4172 - DNA, 24 bp, Homo sapiens
acaccgaacccaaaggacagacac

SEQ ID NO: 4173 - DNA, 24 bp, Homo sapiens
acctggtgacgatggtgtagtgtc

SEQ ID NO: 4174 - DNA, 24 bp, Homo sapiens
agtgtctcgtaggaacttgtgagt

SEQ ID NO: 4175 - DNA, 24 bp, Homo sapiens
acctccactcttccttgtatgtgc

SEQ ID NO: 4176 - DNA, 25 bp, Homo sapiens
cgagggagaacgcgacatactgtag

SEQ ID NO: 4177 - DNA, 24 bp, Homo sapiens
attttagttaaggctaccacctct

SEQ ID NO: 4178 - DNA, 24 bp, Homo sapiens
ttttagttaaggctaccacctcta

SEQ ID NO: 4179 - DNA, 24 bp, Homo sapiens
aattttagttaaggctaccacctc

SEQ ID NO: 4180 - DNA, 24 bp, Homo sapiens
gtcgtattacgggtaccgaggaga

SEQ ID NO: 4181 - DNA, 24 bp, Homo sapiens
tcgtattacgggtaccgaggagac

SEQ ID NO: 4182 - DNA, 24 bp, Homo sapiens
ggtcgtattacgggtaccgaggag

SEQ ID NO: 4183 - DNA, 24 bp, Homo sapiens
accgaggagacatcatgcgacagc

SEQ ID NO: 4184 - DNA, 25 bp, Homo sapiens
agtaaacactacagtatctggtcgt

SEQ ID NO: 4185 - DNA, 25 bp, Homo sapiens
gggtcctagtaagaaagctgtagcc

SEQ ID NO: 4186 - DNA, 24 bp, Homo sapiens
tgggcgacacagggtatagacttc

SEQ ID NO: 4187 - DNA, 24 bp, Homo sapiens
accgaggagacatcatgcgacagc

SEQ ID NO: 4188 - DNA, 25 bp, Homo sapiens
gggtcctagtaagaaagctgtagcc

SEQ ID NO: 4189 - DNA, 25 bp, Homo sapiens
gcgacagcactaacaagccttagaa

SEQ ID NO: 4190 - DNA, 25 bp, Homo sapiens
tctacttccaccacaacttccgcag

SEQ ID NO: 4191 - DNA, 24 bp, Homo sapiens
tgggcgacacagggtatagacttc

SEQ ID NO: 4192 - DNA, 24 bp, Homo sapiens
accgaggagacatcatgcgacagc

SEQ ID NO: 4193 - DNA, 24 bp, Homo sapiens
aaaggtactgccggacaaagtacc

SEQ ID NO: 4194 - DNA, 24 bp, Homo sapiens
aaggtactgccggacaaagtaccg

SEQ ID NO: 4195 - DNA, 24 bp, Homo sapiens
taaaggtactgccggacaaagtac

SEQ ID NO: 4196 - DNA, 24 bp, Homo sapiens
cagacatggtgaaactcgactcgt

SEQ ID NO: 4197 - DNA, 23 bp, Homo sapiens
gcaagtctgtcaggaaccgaagg

SEQ ID NO: 4198 - DNA, 25 bp, Homo sapiens
ttaagaaaggggagcaacgagaaca

SEQ ID NO: 4199 - DNA, 25 bp, Homo sapiens
ccttccggctgaattgcttctcctt

SEQ ID NO: 4200 - DNA, 23 bp, Homo sapiens
ggcactacaattatctgacgcgg

SEQ ID NO: 4201 - DNA, 23 bp, Homo sapiens
ctcgtaaagatcgacgccgtcta

SEQ ID NO: 4202 - DNA, 25 bp, Homo sapiens
ccttccggctgaattgcttctcctt

SEQ ID NO: 4203 - DNA, 24 bp, Homo sapiens
cagacatggtgaaactcgactcgt

SEQ ID NO: 4204 - DNA, 23 bp, Homo sapiens
gcaagtctgtcaggaaccgaagg

SEQ ID NO: 4205 - DNA, 23 bp, Homo sapiens
gcagtcaccctgctcattaagaa

SEQ ID NO: 4206 - DNA, 24 bp, Homo sapiens
acccttccggctgaattgcttctc

SEQ ID NO: 4207 - DNA, 24 bp, Homo sapiens
cgaggcactacaattatctgacgc

SEQ ID NO: 4208 - DNA, 24 bp, Homo sapiens
cagacatggtgaaactcgactcgt

SEQ ID NO: 4209 - DNA, 23 bp, Homo sapiens
gcaagtctgtcaggaaccgaagg

SEQ ID NO: 4210 - DNA, 25 bp, Homo sapiens
ctgttcttgaggtgaaggaccaggt

SEQ ID NO: 4211 - DNA, 24 bp, Homo sapiens
cagacatggtgaaactcgactcgt

SEQ ID NO: 4212 - DNA, 23 bp, Homo sapiens
gcaagtctgtcaggaaccgaagg

SEQ ID NO: 4213 - DNA, 25 bp, Homo sapiens
ctacaattatctgacgcggtacaac

SEQ ID NO: 4214 - DNA, 24 bp, Homo sapiens
gtaaagatcgacgccgtctaagtc

SEQ ID NO: 4215 - DNA, 23 bp, Homo sapiens
ccgtctaagtcgaggcactacaa

SEQ ID NO: 4216 - DNA, 25 bp, Homo sapiens
acgaaccaatcttttagatagaagg

SEQ ID NO: 4217 - DNA, 23 bp, Homo sapiens
agaggacttctcgaccaacctaa

SEQ ID NO: 4218 - DNA, 24 bp, Homo sapiens
cagacatggtgaaactcgactcgt

SEQ ID NO: 4219 - DNA, 23 bp, Homo sapiens
gcaagtctgtcaggaaccgaagg

SEQ ID NO: 4220 - DNA, 25 bp, Homo sapiens
cctgtatgtatcttgagcagtcacc

SEQ ID NO: 4221 - DNA, 24 bp, Homo sapiens
gacactcgacgacttagaagactg

SEQ ID NO: 4222 - DNA, 23 bp, Homo sapiens
ccggaatcgtcatcggactcgac

SEQ ID NO: 4223 - DNA, 23 bp, Homo sapiens
tagtggtccttcggtgcgggttt

SEQ ID NO: 4224 - DNA, 24 bp, Homo sapiens
ctggaggcgtggccttcgtgttgg

SEQ ID NO: 4225 - DNA, 24 bp, Homo sapiens
gacgtggccaccgtggtagaacag

SEQ ID NO: 4226 - DNA, 23 bp, Homo sapiens
tcctcgtccagtgtcactccgtc

SEQ ID NO: 4227 - DNA, 24 bp, Homo sapiens
tcacagtcgcagaggaaccatacc

SEQ ID NO: 4228 - DNA, 24 bp, Homo sapiens
cctacattctgtctggagcgtcgt

SEQ ID NO: 4229 - DNA, 24 bp, Homo sapiens
aagacaccaaagtccagagacacg

SEQ ID NO: 4230 - DNA, 24 bp, Homo sapiens
tagtacgactaagaacgtgagtca

SEQ ID NO: 4231 - DNA, 24 bp, Homo sapiens
agtacgactaagaacgtgagtcag

SEQ ID NO: 4232 - DNA, 24 bp, Homo sapiens
ttagtacgactaagaacgtgagtc

SEQ ID NO: 4233 - DNA, 23 bp, Homo sapiens
gtgagtcagggctcgacggtttc

SEQ ID NO: 4234 - DNA, 23 bp, Homo sapiens
aagcgacggagaagtcacgtata

SEQ ID NO: 4235 - DNA, 24 bp, Homo sapiens
gtaagtaaggtcaaggtagaacat

SEQ ID NO: 4236 - DNA, 24 bp, Homo sapiens
taagtaaggtcaaggtagaacatg

SEQ ID NO: 4237 - DNA, 24 bp, Homo sapiens
ggtaagtaaggtcaaggtagaaca

SEQ ID NO: 4238 - DNA, 24 bp, Homo sapiens
gaacccgtaaggacccgtccagtc

SEQ ID NO: 4239 - DNA, 24 bp, Homo sapiens
ggccctggtatgtgtagggtatac

SEQ ID NO: 4240 - DNA, 24 bp, Homo sapiens
tggcaacaaggaggatgtccgtga

SEQ ID NO: 4241 - DNA, 24 bp, Homo sapiens
aatccggtctgaaagttcagtacg

SEQ ID NO: 4242 - DNA, 24 bp, Homo sapiens
aaaacacccaagactaggtagacg

SEQ ID NO: 4243 - DNA, 24 bp, Homo sapiens
gactctctcacgatgaacaagacg

SEQ ID NO: 4244 - DNA, 24 bp, Homo sapiens
gttgtaacccagaaggtcctgtcg

SEQ ID NO: 4245 - DNA, 24 bp, Homo sapiens
agtcggtaagtaaggtcaaggtag

SEQ ID NO: 4246 - DNA, 24 bp, Homo sapiens
tggcaacaaggaggatgtccgtga

SEQ ID NO: 4247 - DNA, 24 bp, Homo sapiens
aaatcgtgaatggacactgaggta

SEQ ID NO: 4248 - DNA, 24 bp, Homo sapiens
aatcgtgaatggacactgaggtat

SEQ ID NO: 4249 - DNA, 24 bp, Homo sapiens
aaaatcgtgaatggacactgaggt

SEQ ID NO: 4250 - DNA, 24 bp, Homo sapiens
ttacacagactggaaatgacgtaa

SEQ ID NO: 4251 - DNA, 24 bp, Homo sapiens
tacacagactggaaatgacgtaac

SEQ ID NO: 4252 - DNA, 24 bp, Homo sapiens
cttacacagactggaaatgacgta

SEQ ID NO: 4253 - DNA, 24 bp, Homo sapiens
ccgctaaggattgtctgaccaacc

SEQ ID NO: 4254 - DNA, 24 bp, Homo sapiens
gtaactcgtcgctacttcgttagt

SEQ ID NO: 4255 - DNA, 24 bp, Homo sapiens
tcccaaaagtcgtcaaggtaggtg

SEQ ID NO: 4256 - DNA, 24 bp, Homo sapiens
aacgacagaatacgaagtcacgaa

SEQ ID NO: 4257 - DNA, 24 bp, Homo sapiens
taccaccaacggtcgtgttagtca

SEQ ID NO: 4258 - DNA, 24 bp, Homo sapiens
ggtgaacaagaagtgactcctcct

SEQ ID NO: 4259 - DNA, 25 bp, Homo sapiens
tacacaacttttccttttatgacaa

SEQ ID NO: 4260 - DNA, 25 bp, Homo sapiens
tgtaggacgtaaataggttgtgaaa

SEQ ID NO: 4261 - DNA, 25 bp, Homo sapiens
tttcgggaagtactaaaagtttacg

SEQ ID NO: 4262 - DNA, 24 bp, Homo sapiens
gaagtcctaaacacgatgagagtt

SEQ ID NO: 4263 - DNA, 24 bp, Homo sapiens
aagtcctaaacacgatgagagttg

SEQ ID NO: 4264 - DNA, 24 bp, Homo sapiens
ggaagtcctaaacacgatgagagt

SEQ ID NO: 4265 - DNA, 24 bp, Homo sapiens
acaccgtatcgctggaagttatgg

SEQ ID NO: 4266 - DNA, 24 bp, Homo sapiens
agatgaacgaggtcgaataagaca

SEQ ID NO: 4267 - DNA, 25 bp, Homo sapiens
ccgacgcaagtagtaatagtaacca

SEQ ID NO: 4268 - DNA, 25 bp, Homo sapiens
gtaagagactagaacgacgacgacg

SEQ ID NO: 4269 - DNA, 25 bp, Homo sapiens
tggaagttgaacaggtgatgctgcg

SEQ ID NO: 4270 - DNA, 25 bp, Homo sapiens
caagagaaaacaaccgtaggtgagt

SEQ ID NO: 4271 - DNA, 23 bp, Homo sapiens
ttcgtactcgtaggaaacacttc

SEQ ID NO: 4272 - DNA, 25 bp, Homo sapiens
aacgaagttgaaggtctcaaagttt

SEQ ID NO: 4273 - DNA, 25 bp, Homo sapiens
tcgaatctagctcctgttgggacca

SEQ ID NO: 4274 - DNA, 25 bp, Homo sapiens
accatgaaccctgagtttgacaccc

SEQ ID NO: 4275 - DNA, 25 bp, Homo sapiens
cggtggacgtgaaggtagataggta

SEQ ID NO: 4276 - DNA, 24 bp, Homo sapiens
atccgtccactgcaaccgctcatc

SEQ ID NO: 4277 - DNA, 24 bp, Homo sapiens
cctgaccaacctcttatcctacct

SEQ ID NO: 4278 - DNA, 24 bp, Homo sapiens
aacctctccatccactcatcgacc

SEQ ID NO: 4279 - DNA, 24 bp, Homo sapiens
cgtgtctgtggttcctagtaactc

SEQ ID NO: 4280 - DNA, 24 bp, Homo sapiens
tacgcttgtaccttcaaccactac

SEQ ID NO: 4281 - DNA, 24 bp, Homo sapiens
tctggcacatcagtgttcaccgaa

SEQ ID NO: 4282 - DNA, 23 bp, Homo sapiens
tactgacgacctgtctcttactt

SEQ ID NO: 4283 - DNA, 23 bp, Homo sapiens
actagtccagtaacctccacttc

SEQ ID NO: 4284 - DNA, 23 bp, Homo sapiens
tgggggtgggggtgggggtggtt

SEQ ID NO: 4285 - DNA, 24 bp, Homo sapiens
gacacactgtgagaggtgtctata

SEQ ID NO: 4286 - DNA, 24 bp, Homo sapiens
acacactgtgagaggtgtctatat

SEQ ID NO: 4287 - DNA, 24 bp, Homo sapiens
agacacactgtgagaggtgtctat

SEQ ID NO: 4288 - DNA, 24 bp, Homo sapiens
aagaggtcctcagagtaccggact

SEQ ID NO: 4289 - DNA, 24 bp, Homo sapiens
agaggtcctcagagtaccggactc

SEQ ID NO: 4290 - DNA, 24 bp, Homo sapiens
gaagaggtcctcagagtaccggac

SEQ ID NO: 4291 - DNA, 25 bp, Homo sapiens
agaccgaaacgaaagagcctagact

SEQ ID NO: 4292 - DNA, 25 bp, Homo sapiens
aggttcgtattagttcagtcgtaga

SEQ ID NO: 4293 - DNA, 25 bp, Homo sapiens
tcaaagaagacctcgtgtatgggca

SEQ ID NO: 4294 - DNA, 24 bp, Homo sapiens
acacaaaaattgaaacacgtcgac

SEQ ID NO: 4295 - DNA, 24 bp, Homo sapiens
cacaaaaattgaaacacgtcgact

SEQ ID NO: 4296 - DNA, 24 bp, Homo sapiens
aacacaaaaattgaaacacgtcga

SEQ ID NO: 4297 - DNA, 24 bp, Homo sapiens
actccagggtatgtgttgtttacg

SEQ ID NO: 4298 - DNA, 24 bp, Homo sapiens
cgacgagagagtataagtgggacc

SEQ ID NO: 4299 - DNA, 24 bp, Homo sapiens
gactccgtcgtcgtatcacgttcc

SEQ ID NO: 4300 - DNA, 25 bp, Homo sapiens
agagaatcgtgtccttagaacaagt

SEQ ID NO: 4301 - DNA, 25 bp, Homo sapiens
acggtatggtgtgtctacgaaaggt

SEQ ID NO: 4302 - DNA, 25 bp, Homo sapiens
acgcaaaccgatttccaagaagtaa

SEQ ID NO: 4303 - DNA, 24 bp, Homo sapiens
tagtagaaaacaagcaccaggaga

SEQ ID NO: 4304 - DNA, 25 bp, Homo sapiens
ctactctgtcaggaacctacattct

SEQ ID NO: 4305 - DNA, 24 bp, Homo sapiens
tcagacaccacagtagagggtcgt

SEQ ID NO: 4306 - DNA, 23 bp, Homo sapiens
tgtctcttatatgtccttttact

SEQ ID NO: 4307 - DNA, 24 bp, Homo sapiens
acgtgtcgtagggacgttgtgtta

SEQ ID NO: 4308 - DNA, 24 bp, Homo sapiens
cgtgtcgtagggacgttgtgttaa

SEQ ID NO: 4309 - DNA, 24 bp, Homo sapiens
aacgtgtcgtagggacgttgtgtt

SEQ ID NO: 4310 - DNA, 25 bp, Homo sapiens
ttgaccctatgtctcatcctcgcct

SEQ ID NO: 4311 - DNA, 25 bp, Homo sapiens
cagtagtaggagtccctctgacatt

SEQ ID NO: 4312 - DNA, 24 bp, Homo sapiens
ctccaggtgttgacagaactaccg

SEQ ID NO: 4313 - DNA, 24 bp, Homo sapiens
acagactgaatgacttactcgaga

SEQ ID NO: 4314 - DNA, 24 bp, Homo sapiens
cagactgaatgacttactcgagat

SEQ ID NO: 4315 - DNA, 24 bp, Homo sapiens
aacagactgaatgacttactcgag

SEQ ID NO: 4316 - DNA, 25 bp, Homo sapiens
gtaacaggtcagtattagtcgttcg

SEQ ID NO: 4317 - DNA, 25 bp, Homo sapiens
actcgttgaaagggtccgtttactc

SEQ ID NO: 4318 - DNA, 24 bp, Homo sapiens
ctacaactgtctacgaccgtccga

SEQ ID NO: 4319 - DNA, 24 bp, Homo sapiens
tataccgcggaggcgatcgtcgtg

SEQ ID NO: 4320 - DNA, 24 bp, Homo sapiens
ataccgcggaggcgatcgtcgtgg

SEQ ID NO: 4321 - DNA, 24 bp, Homo sapiens
ttataccgcggaggcgatcgtcgt

SEQ ID NO: 4322 - DNA, 25 bp, Homo sapiens
aacggttgacttggaagagtagacg

SEQ ID NO: 4323 - DNA, 23 bp, Homo sapiens
tgaatcggtcaaggactaggtcg

SEQ ID NO: 4324 - DNA, 23 bp, Homo sapiens
gaccgacacttcctcacagatta

SEQ ID NO: 4325 - DNA, 25 bp, Homo sapiens
ggaactctaggaaccatcatcgccg

SEQ ID NO: 4326 - DNA, 25 bp, Homo sapiens
agacttctccgtgacagattatgtt

SEQ ID NO: 4327 - DNA, 24 bp, Homo sapiens
acacctacgacttctcgactcacg

SEQ ID NO: 4328 - DNA, 25 bp, Homo sapiens
ggaactctaggaaccatcatcgccg

SEQ ID NO: 4329 - DNA, 25 bp, Homo sapiens
agacttctccgtgacagattatgtt

SEQ ID NO: 4330 - DNA, 24 bp, Homo sapiens
acgaccgaacagaactactaaccg

SEQ ID NO: 4331 - DNA, 25 bp, Homo sapiens
tcgtcattatggagctgactcacgt

SEQ ID NO: 4332 - DNA, 25 bp, Homo sapiens
agcacatcacaactgaacatccgaa

SEQ ID NO: 4333 - DNA, 25 bp, Homo sapiens
aataaccactccgtccgtgacctaa

SEQ ID NO: 4334 - DNA, 25 bp, Homo sapiens
accaccaaagtccatgtcctagagg

SEQ ID NO: 4335 - DNA, 25 bp, Homo sapiens
ggacttcgttcttaaactgacaaca

SEQ ID NO: 4336 - DNA, 25 bp, Homo sapiens
tgaactcgtttccagacaccttctt

SEQ ID NO: 4337 - DNA, 25 bp, Homo sapiens
tccagaaaccctacttcttggctaa

SEQ ID NO: 4338 - DNA, 25 bp, Homo sapiens
tcaaggtaaacttcttcctgagacg

SEQ ID NO: 4339 - DNA, 25 bp, Homo sapiens
agtgtagtgaccgttagaatcctga

SEQ ID NO: 4340 - DNA, 25 bp, Homo sapiens
tgctagatcgagaacgtattgctgg

SEQ ID NO: 4341 - DNA, 25 bp, Homo sapiens
ctgacagcaactactttacttgacg

SEQ ID NO: 4342 - DNA, 25 bp, Homo sapiens
cttattaaggaccacgacctctgtc

SEQ ID NO: 4343 - DNA, 25 bp, Homo sapiens
tgaactcgtttccagacaccttctt

SEQ ID NO: 4344 - DNA, 24 bp, Homo sapiens
aaagaactacggacgacccaaccc

SEQ ID NO: 4345 - DNA, 25 bp, Homo sapiens
tcgggttagaaactttatgtaggca

SEQ ID NO: 4346 - DNA, 23 bp, Homo sapiens
ctctagttgagggttcggaagta

SEQ ID NO: 4347 - DNA, 23 bp, Homo sapiens
gctcgttttcgtactctcggtta

SEQ ID NO: 4348 - DNA, 25 bp, Homo sapiens
cgacggagactattaacagggactt

SEQ ID NO: 4349 - DNA, 25 bp, Homo sapiens
gagaaccagaccataaggtagtagt

SEQ ID NO: 4350 - DNA, 25 bp, Homo sapiens
tggtcatccttattccacaggtaca

SEQ ID NO: 4351 - DNA, 25 bp, Homo sapiens
cgaggagtagaagtagtcttaacgg

SEQ ID NO: 4352 - DNA, 25 bp, Homo sapiens
aagaacgttagctatggtgagaagt

SEQ ID NO: 4353 - DNA, 25 bp, Homo sapiens
cgttagacgaacccagaaaaaggta

SEQ ID NO: 4354 - DNA, 23 bp, Homo sapiens
actgtcttcccttttagcggcgg

SEQ ID NO: 4355 - DNA, 25 bp, Homo sapiens
gagaaccagaccataaggtagtagt

SEQ ID NO: 4356 - DNA, 25 bp, Homo sapiens
tcatccttattccacaggtacacaa

SEQ ID NO: 4357 - DNA, 24 bp, Homo sapiens
atgttgtgcgttgaggtttgttga

SEQ ID NO: 4358 - DNA, 24 bp, Homo sapiens
tgttgtgcgttgaggtttgttgac

SEQ ID NO: 4359 - DNA, 24 bp, Homo sapiens
tatgttgtgcgttgaggtttgttg

SEQ ID NO: 4360 - DNA, 25 bp, Homo sapiens
ttagcatgaccgaacacagacaacg

SEQ ID NO: 4361 - DNA, 25 bp, Homo sapiens
ctgtagcacaagtggttcttcttcc

SEQ ID NO: 4362 - DNA, 23 bp, Homo sapiens
aagacgaaggagaacaccagcaa

SEQ ID NO: 4363 - DNA, 25 bp, Homo sapiens
ggtcgtagtgaacttgttctcttcg

SEQ ID NO: 4364 - DNA, 24 bp, Homo sapiens
ggtccaccgtaggttcttatcgtt

SEQ ID NO: 4365 - DNA, 24 bp, Homo sapiens
acgacagtatgttgtgacggtcca

SEQ ID NO: 4366 - DNA, 24 bp, Homo sapiens
acaaccttaccagactcgtattgt

SEQ ID NO: 4367 - DNA, 24 bp, Homo sapiens
caaccttaccagactcgtattgtt

SEQ ID NO: 4368 - DNA, 24 bp, Homo sapiens
aacaaccttaccagactcgtattg

SEQ ID NO: 4369 - DNA, 25 bp, Homo sapiens
cgagtgtccgctaccgtatcaagaa

SEQ ID NO: 4370 - DNA, 25 bp, Homo sapiens
accaaaggctattgtcgtgaagtcc

SEQ ID NO: 4371 - DNA, 24 bp, Homo sapiens
aacgacacccagtaagccacgaaa

SEQ ID NO: 4372 - DNA, 25 bp, Homo sapiens
acggtagtagttacaagaagtgcta

SEQ ID NO: 4373 - DNA, 25 bp, Homo sapiens
ttgtcagttaaggtcggtggtctct

SEQ ID NO: 4374 - DNA, 25 bp, Homo sapiens
cggaacacaaattctcgtcccagag

SEQ ID NO: 4375 - DNA, 24 bp, Homo sapiens
tagaggtcgtgggatgtccttctc

SEQ ID NO: 4376 - DNA, 24 bp, Homo sapiens
agaggtcgtgggatgtccttctct

SEQ ID NO: 4377 - DNA, 24 bp, Homo sapiens
ctagaggtcgtgggatgtccttct

SEQ ID NO: 4378 - DNA, 25 bp, Homo sapiens
gacctatggaccgtccgtacaagac

SEQ ID NO: 4379 - DNA, 25 bp, Homo sapiens
tcgtttgtaatcagatgcgtcccgt

SEQ ID NO: 4380 - DNA, 25 bp, Homo sapiens
gcaagactctgaaggaggagacact

SEQ ID NO: 4381 - DNA, 25 bp, Homo sapiens
cgaatatgacaaatgtagggagtaa

SEQ ID NO: 4382 - DNA, 25 bp, Homo sapiens
aatgtgtctttgttccttctgtcca

SEQ ID NO: 4383 - DNA, 25 bp, Homo sapiens
agacaccattcgatgattaactgta

SEQ ID NO: 4384 - DNA, 25 bp, Homo sapiens
cgtcaaccttgttcagcgagttcag

SEQ ID NO: 4385 - DNA, 25 bp, Homo sapiens
agtgttctgtcagtagtcttggtca

SEQ ID NO: 4386 - DNA, 24 bp, Homo sapiens
cgggacttcttgtcggtttccacg

SEQ ID NO: 4387 - DNA, 24 bp, Homo sapiens
ttgaccactgagtccaccagaagg

SEQ ID NO: 4388 - DNA, 23 bp, Homo sapiens
ctcataggcgttacgacccaccc

SEQ ID NO: 4389 - DNA, 25 bp, Homo sapiens
cgtcaaccttgttcagcgagttcag

SEQ ID NO: 4390 - DNA, 25 bp, Homo sapiens
tccacaacatagtttgaagtcccga

SEQ ID NO: 4391 - DNA, 25 bp, Homo sapiens
aagtcctagtccttgtatgtcttgg

SEQ ID NO: 4392 - DNA, 25 bp, Homo sapiens
agtcggagtctactacaaccactgt

SEQ ID NO: 4393 - DNA, 25 bp, Homo sapiens
tcactttcatctactccctcaacga

SEQ ID NO: 4394 - DNA, 24 bp, Homo sapiens
acttctatgttgagcacgtccagc

SEQ ID NO: 4395 - DNA, 25 bp, Homo sapiens
agagtcatttacgaaggaggaggag

SEQ ID NO: 4396 - DNA, 25 bp, Homo sapiens
agtcggagtctactacaaccactgt

SEQ ID NO: 4397 - DNA, 25 bp, Homo sapiens
cctcaacgaagacaacctacctgta

SEQ ID NO: 4398 - DNA, 24 bp, Homo sapiens
ttgatcgtcgtgtggtgactgaca

SEQ ID NO: 4399 - DNA, 25 bp, Homo sapiens
tccacaacatagtttgaagtcccga

SEQ ID NO: 4400 - DNA, 25 bp, Homo sapiens
aagtcctagtccttgtatgtcttgg

SEQ ID NO: 4401 - DNA, 25 bp, Homo sapiens
tcggagtctactacaaccactgtct

SEQ ID NO: 4402 - DNA, 25 bp, Homo sapiens
taagagaccgacgacgaactaatga

SEQ ID NO: 4403 - DNA, 25 bp, Homo sapiens
ctgaggtccagacgaaagtgacatc

SEQ ID NO: 4404 - DNA, 25 bp, Homo sapiens
gtgaccctagtgaatccaaaccagc

SEQ ID NO: 4405 - DNA, 24 bp, Homo sapiens
gtaagtccctgggactacttgatc

SEQ ID NO: 4406 - DNA, 24 bp, Homo sapiens
taagtccctgggactacttgatct

SEQ ID NO: 4407 - DNA, 24 bp, Homo sapiens
cgtaagtccctgggactacttgat

SEQ ID NO: 4408 - DNA, 25 bp, Homo sapiens
acggagacttctttcacacggacta

SEQ ID NO: 4409 - DNA, 25 bp, Homo sapiens
tatatttctacggtactacggtggg

SEQ ID NO: 4410 - DNA, 24 bp, Homo sapiens
aaagccaactaaaggtttctctcg

SEQ ID NO: 4411 - DNA, 24 bp, Homo sapiens
aaggtgagagttggactagattaa

SEQ ID NO: 4412 - DNA, 24 bp, Homo sapiens
aagggtacgacgactgaagaaaca

SEQ ID NO: 4413 - DNA, 25 bp, Homo sapiens
acggagacttctttcacacggacta

SEQ ID NO: 4414 - DNA, 25 bp, Homo sapiens
tatatttctacggtactacggtggg

SEQ ID NO: 4415 - DNA, 25 bp, Homo sapiens
ggagacaagatcaagtacgaccaca

SEQ ID NO: 4416 - DNA, 25 bp, Homo sapiens
caagagtcacaagaattgagtaggt

SEQ ID NO: 4417 - DNA, 25 bp, Homo sapiens
gaatggagaaacttcgacgaggaca

SEQ ID NO: 4418 - DNA, 25 bp, Homo sapiens
ctcggaaagacatttgtcgtcgtcg

SEQ ID NO: 4419 - DNA, 24 bp, Homo sapiens
acaaacagatgttcgctcaagtcg

SEQ ID NO: 4420 - DNA, 25 bp, Homo sapiens
gaagatggacccatgagttacgaaa

SEQ ID NO: 4421 - DNA, 25 bp, Homo sapiens
actctaggaactatgatctccgtac

SEQ ID NO: 4422 - DNA, 25 bp, Homo sapiens
gctgaagggtacgacgactgaagaa

SEQ ID NO: 4423 - DNA, 25 bp, Homo sapiens
ttcaataggtgtcgatgactcctgg

SEQ ID NO: 4424 - DNA, 25 bp, Homo sapiens
ggtcaacaaactacaccaggaggta

SEQ ID NO: 4425 - DNA, 24 bp, Homo sapiens
aagggtacgacgactgaagaaaca

SEQ ID NO: 4426 - DNA, 25 bp, Homo sapiens
ttcaataggtgtcgatgactcctgg

SEQ ID NO: 4427 - DNA, 25 bp, Homo sapiens
ggtcaacaaactacaccaggaggta

SEQ ID NO: 4428 - DNA, 25 bp, Homo sapiens
acggagacttctttcacacggacta

SEQ ID NO: 4429 - DNA, 25 bp, Homo sapiens
tgctggtgaaaggtgtagtgttatc

SEQ ID NO: 4430 - DNA, 25 bp, Homo sapiens
acacgatcttcagcctattccaacg

SEQ ID NO: 4431 - DNA, 25 bp, Homo sapiens
cgaacatacaagttgtgacttccga

SEQ ID NO: 4432 - DNA, 24 bp, Homo sapiens
cgaagtacgttggacgtttaatgg

SEQ ID NO: 4433 - DNA, 24 bp, Homo sapiens
gaagtacgttggacgtttaatggt

SEQ ID NO: 4434 - DNA, 24 bp, Homo sapiens
acgaagtacgttggacgtttaatg

SEQ ID NO: 4435 - DNA, 24 bp, Homo sapiens
aggttctagtggaaatccgttact

SEQ ID NO: 4436 - DNA, 24 bp, Homo sapiens
ggttctagtggaaatccgttactt

SEQ ID NO: 4437 - DNA, 24 bp, Homo sapiens
aaggttctagtggaaatccgttac

SEQ ID NO: 4438 - DNA, 24 bp, Homo sapiens
cggtcgttgtatgtgcgtaggaga

SEQ ID NO: 4439 - DNA, 25 bp, Homo sapiens
agataaagacggcggttagacggta

SEQ ID NO: 4440 - DNA, 25 bp, Homo sapiens
agacgattgtaagctcactcaacga

SEQ ID NO: 4441 - DNA, 25 bp, Homo sapiens
acaaaaaccttataccgacgacttt

SEQ ID NO: 4442 - DNA, 23 bp, Homo sapiens
gcgaataatgactgtttgggtac

SEQ ID NO: 4443 - DNA, 25 bp, Homo sapiens
tggtagcgtatacatggtcgtaagg

SEQ ID NO: 4444 - DNA, 24 bp, Homo sapiens
aagccgtgaacataacgactctta

SEQ ID NO: 4445 - DNA, 24 bp, Homo sapiens
ataggccgtctccaccctccgaaa

SEQ ID NO: 4446 - DNA, 24 bp, Homo sapiens
cgtgtcccgatgcaaatcaggtat

SEQ ID NO: 4447 - DNA, 25 bp, Homo sapiens
taatgtacagttgtagatctgaagt

SEQ ID NO: 4448 - DNA, 23 bp, Homo sapiens
ggcgtaggtggtggtaggacgac

SEQ ID NO: 4449 - DNA, 23 bp, Homo sapiens
gtgcccgacctttccgggtaacc

SEQ ID NO: 4450 - DNA, 24 bp, Homo sapiens
tcatttgtactggactcctctcag

SEQ ID NO: 4451 - DNA, 24 bp, Homo sapiens
catttgtactggactcctctcagt

SEQ ID NO: 4452 - DNA, 24 bp, Homo sapiens
gtcatttgtactggactcctctca

SEQ ID NO: 4453 - DNA, 24 bp, Homo sapiens
gccaccagcagagaaaaggaacgt

SEQ ID NO: 4454 - DNA, 24 bp, Homo sapiens
ccaccagcagagaaaaggaacgtc

SEQ ID NO: 4455 - DNA, 24 bp, Homo sapiens
ggccaccagcagagaaaaggaacg

SEQ ID NO: 4456 - DNA, 25 bp, Homo sapiens
cgtggaaggtacagatgttaggtga

SEQ ID NO: 4457 - DNA, 25 bp, Homo sapiens
gtggtcatttgtactggactcctct

SEQ ID NO: 4458 - DNA, 25 bp, Homo sapiens
tctgtttgactaacctgactctcgc

SEQ ID NO: 4459 - DNA, 25 bp, Homo sapiens
acgatatttgtactcctacttgtcc

SEQ ID NO: 4460 - DNA, 25 bp, Homo sapiens
tggtcagaagacaatcttacctatt

SEQ ID NO: 4461 - DNA, 25 bp, Homo sapiens
tctgtttgactaacctgactctcgc

SEQ ID NO: 4462 - DNA, 25 bp, Homo sapiens
actggtaacgatatttgtactccta

SEQ ID NO: 4463 - DNA, 25 bp, Homo sapiens
tggtcagaagacaatcttacctatt

SEQ ID NO: 4464 - DNA, 25 bp, Homo sapiens
tctgtttgactaacctgactctcgc

SEQ ID NO: 4465 - DNA, 25 bp, Homo sapiens
tctgtttgactaacctgactctcgc

SEQ ID NO: 4466 - DNA, 23 bp, Homo sapiens
gccaccagcagagaaaaggaacg

SEQ ID NO: 4467 - DNA, 25 bp, Homo sapiens
acctaagaacaatgtacaagcgtgt

SEQ ID NO: 4468 - DNA, 25 bp, Homo sapiens
gtggtcatttgtactggactcctct

SEQ ID NO: 4469 - DNA, 25 bp, Homo sapiens
tctgtttgactaacctgactctcgc

SEQ ID NO: 4470 - DNA, 25 bp, Homo sapiens
cgatcctcctactattgtcaccgta

SEQ ID NO: 4471 - DNA, 25 bp, Homo sapiens
tggtatgaaggtgggaggaaggaca

SEQ ID NO: 4472 - DNA, 25 bp, Homo sapiens
tccagtaaggtcctccacccagtaa

SEQ ID NO: 4473 - DNA, 25 bp, Homo sapiens
cgtggaaggtacagatgttaggtga

SEQ ID NO: 4474 - DNA, 25 bp, Homo sapiens
acctaagaacaatgtacaagcgtgt

SEQ ID NO: 4475 - DNA, 24 bp, Homo sapiens
ggcccctccttgagtcacctaaga

SEQ ID NO: 4476 - DNA, 24 bp, Homo sapiens
gcccctccttgagtcacctaagaa

SEQ ID NO: 4477 - DNA, 24 bp, Homo sapiens
gggcccctccttgagtcacctaag

SEQ ID NO: 4478 - DNA, 25 bp, Homo sapiens
cgtcgttcagactcaactccttcaa

SEQ ID NO: 4479 - DNA, 24 bp, Homo sapiens
gagaactccagtcgaacacagtgc

SEQ ID NO: 4480 - DNA, 25 bp, Homo sapiens
tggttttgaacgagcttcggttttg

SEQ ID NO: 4481 - DNA, 23 bp, Homo sapiens
ccgagtacggaccacccgtctag

SEQ ID NO: 4482 - DNA, 25 bp, Homo sapiens
gatcttgtgagaacaaatgacttgt

SEQ ID NO: 4483 - DNA, 25 bp, Homo sapiens
acttttctaggttcagaaggagact

SEQ ID NO: 4484 - DNA, 25 bp, Homo sapiens
taagttacagttgaccaaggcatcg

SEQ ID NO: 4485 - DNA, 25 bp, Homo sapiens
aggttacggtcacacccaaacagta

SEQ ID NO: 4486 - DNA, 25 bp, Homo sapiens
ccagtatagtatgagacaacgacga

SEQ ID NO: 4487 - DNA, 24 bp, Homo sapiens
accttcggtcatacctactcctct

SEQ ID NO: 4488 - DNA, 24 bp, Homo sapiens
aacggataacgagcctagaacaag

SEQ ID NO: 4489 - DNA, 24 bp, Homo sapiens
ccgccgtaggagagtaattaagcc

SEQ ID NO: 4490 - DNA, 25 bp, Homo sapiens
gcagaacccttaacgtagtaatcgc

SEQ ID NO: 4491 - DNA, 25 bp, Homo sapiens
cgtcagtaaaggagtagacttagtg

SEQ ID NO: 4492 - DNA, 25 bp, Homo sapiens
aggaatcaatataacgagggagggt

SEQ ID NO: 4493 - DNA, 25 bp, Homo sapiens
accgtcttatagtagtagtagaagt

SEQ ID NO: 4494 - DNA, 25 bp, Homo sapiens
tcctgactgtacgactgtaactcct

SEQ ID NO: 4495 - DNA, 25 bp, Homo sapiens
aaggaagaaccacaacctcaactct

SEQ ID NO: 4496 - DNA, 24 bp, Homo sapiens
ggttaccgagactagaataaggac

SEQ ID NO: 4497 - DNA, 25 bp, Homo sapiens
taacaaccttcctactataacgacg

SEQ ID NO: 4498 - DNA, 25 bp, Homo sapiens
gcttcagtagaagaccaggacttga

SEQ ID NO: 4499 - DNA, 25 bp, Homo sapiens
agtatgacactgaagtataaagagt

SEQ ID NO: 4500 - DNA, 23 bp, Homo sapiens
tattcggtcgccagggttaagcc

SEQ ID NO: 4501 - DNA, 25 bp, Homo sapiens
gacgagcaactccattatgacctct

SEQ ID NO: 4502 - DNA, 25 bp, Homo sapiens
gtgctaggtttcgatcaagatttcg

SEQ ID NO: 4503 - DNA, 24 bp, Homo sapiens
agacgtgctaggtttcgatcaaga

SEQ ID NO: 4504 - DNA, 25 bp, Homo sapiens
tccagagacagcccgtgaaagttac

SEQ ID NO: 4505 - DNA, 25 bp, Homo sapiens
aaagaaggtgaactatccataaagg

SEQ ID NO: 4506 - DNA, 23 bp, Homo sapiens
tgcgactacttcaccccacttgt

SEQ ID NO: 4507 - DNA, 24 bp, Homo sapiens
agacgtgctaggtttcgatcaaga

SEQ ID NO: 4508 - DNA, 25 bp, Homo sapiens
tccagagacagcccgtgaaagttac

SEQ ID NO: 4509 - DNA, 25 bp, Homo sapiens
tacccaaggtgacccagatgtcctc

SEQ ID NO: 4510 - DNA, 25 bp, Homo sapiens
agtaacagacaacaccgcctaataa

SEQ ID NO: 4511 - DNA, 25 bp, Homo sapiens
accaagtagaagtgagagtgtaacc

SEQ ID NO: 4512 - DNA, 25 bp, Homo sapiens
catgtatcttgaatccgtgcgaacg

SEQ ID NO: 4513 - DNA, 25 bp, Homo sapiens
gactcctctacacccaccttctcca

SEQ ID NO: 4514 - DNA, 25 bp, Homo sapiens
ctattaaggagtaggagcagaccgt

SEQ ID NO: 4515 - DNA, 24 bp, Homo sapiens
agggctctttgtgaaaagtgtcct

SEQ ID NO: 4516 - DNA, 24 bp, Homo sapiens
gggctctttgtgaaaagtgtcctg

SEQ ID NO: 4517 - DNA, 24 bp, Homo sapiens
aagggctctttgtgaaaagtgtcc

SEQ ID NO: 4518 - DNA, 25 bp, Homo sapiens
ctgtaagttccgtgttgacttatcg

SEQ ID NO: 4519 - DNA, 25 bp, Homo sapiens
tgacattacaaattttcacgaccgt

SEQ ID NO: 4520 - DNA, 25 bp, Homo sapiens
agaacgtcgaaacttaagtcaagtg

SEQ ID NO: 4521 - DNA, 25 bp, Homo sapiens
gaacatcactagatagacgagtagt

SEQ ID NO: 4522 - DNA, 25 bp, Homo sapiens
gaaaggagaattccggttcagttta

SEQ ID NO: 4523 - DNA, 25 bp, Homo sapiens
accgtaggaagtatttgaagaagga

SEQ ID NO: 4524 - DNA, 24 bp, Homo sapiens
tatgtttgacctggcacgaccccc

SEQ ID NO: 4525 - DNA, 24 bp, Homo sapiens
atgtttgacctggcacgacccccg

SEQ ID NO: 4526 - DNA, 24 bp, Homo sapiens
ctatgtttgacctggcacgacccc

SEQ ID NO: 4527 - DNA, 24 bp, Homo sapiens
cgacgaggtgacggttgaacatta

SEQ ID NO: 4528 - DNA, 25 bp, Homo sapiens
tctctgtccttagaagttgaaccgt

SEQ ID NO: 4529 - DNA, 25 bp, Homo sapiens
cgaacttgtgtccttagacgactgg

SEQ ID NO: 4530 - DNA, 25 bp, Homo sapiens
gacctactcacctgcatctcttccg

SEQ ID NO: 4531 - DNA, 25 bp, Homo sapiens
cgaacttgtgtccttagacgactgg

SEQ ID NO: 4532 - DNA, 25 bp, Homo sapiens
cccagaagacccagcagagatgagg

SEQ ID NO: 4533 - DNA, 25 bp, Homo sapiens
tctattacctacaactctcctcccg

SEQ ID NO: 4534 - DNA, 25 bp, Homo sapiens
tctctgtccttagaagttgaaccgt

SEQ ID NO: 4535 - DNA, 25 bp, Homo sapiens
gacctactcacctgcatctcttccg

SEQ ID NO: 4536 - DNA, 23 bp, Homo sapiens
ctggtaggaactcgagatttttc

SEQ ID NO: 4537 - DNA, 23 bp, Homo sapiens
gggtgactcgaacttgtgtcctt

SEQ ID NO: 4538 - DNA, 24 bp, Homo sapiens
gatgaggaaaaagtgaagtagtgg

SEQ ID NO: 4539 - DNA, 24 bp, Homo sapiens
gaatgagggtctccgtaactggcg

SEQ ID NO: 4540 - DNA, 24 bp, Homo sapiens
cgacgaggtgacggttgaacatta

SEQ ID NO: 4541 - DNA, 25 bp, Homo sapiens
tctattacctacaactctcctcccg

SEQ ID NO: 4542 - DNA, 25 bp, Homo sapiens
tgtcaacctatggcagacctcttag

SEQ ID NO: 4543 - DNA, 23 bp, Homo sapiens
gaggtaacttctgagaccgagca

SEQ ID NO: 4544 - DNA, 25 bp, Homo sapiens
cctggtagaagtccttgtccgtgta

SEQ ID NO: 4545 - DNA, 24 bp, Homo sapiens
tcgacagtcagaacctgtaaactt

SEQ ID NO: 4546 - DNA, 25 bp, Homo sapiens
acagaagaccaaggtaacgaggacg

SEQ ID NO: 4547 - DNA, 23 bp, Homo sapiens
tccaaccacgacaaaagaaggtc

SEQ ID NO: 4548 - DNA, 25 bp, Homo sapiens
agcctaaagaactgaaactggtgga

SEQ ID NO: 4549 - DNA, 24 bp, Homo sapiens
cgttagacggaaaacatctttaga

SEQ ID NO: 4550 - DNA, 24 bp, Homo sapiens
agatggtgtcgttctagagcttcc

SEQ ID NO: 4551 - DNA, 24 bp, Homo sapiens
cgtttacgaatggcggacagtcaa

SEQ ID NO: 4552 - DNA, 24 bp, Homo sapiens
gtttacgaatggcggacagtcaag

SEQ ID NO: 4553 - DNA, 24 bp, Homo sapiens
ccgtttacgaatggcggacagtca

SEQ ID NO: 4554 - DNA, 23 bp, Homo sapiens
cggttcgtcccagtggtctgcgt

SEQ ID NO: 4555 - DNA, 23 bp, Homo sapiens
ctaggtgaacacaacccgaggtt

SEQ ID NO: 4556 - DNA, 24 bp, Homo sapiens
tcgggagaaacgttgacacgtact

SEQ ID NO: 4557 - DNA, 25 bp, Homo sapiens
agactgatcttgccactgttacgag

SEQ ID NO: 4558 - DNA, 25 bp, Homo sapiens
gagtgtcgagaccaatgaaggcgtt

SEQ ID NO: 4559 - DNA, 24 bp, Homo sapiens
cgtacttgaagttccgttggtctt

SEQ ID NO: 4560 - DNA, 24 bp, Homo sapiens
atgacaacactagactttctgtaa

SEQ ID NO: 4561 - DNA, 24 bp, Homo sapiens
tgacaacactagactttctgtaag

SEQ ID NO: 4562 - DNA, 24 bp, Homo sapiens
tatgacaacactagactttctgta

SEQ ID NO: 4563 - DNA, 23 bp, Homo sapiens
aaacagcgaacatagccttcgtg

SEQ ID NO: 4564 - DNA, 25 bp, Homo sapiens
tgaacttaggaaaccgttagacagt

SEQ ID NO: 4565 - DNA, 25 bp, Homo sapiens
aaagacacgagaccaaagacaagaa

SEQ ID NO: 4566 - DNA, 23 bp, Homo sapiens
gaacatagccttcgtgacactac

SEQ ID NO: 4567 - DNA, 25 bp, Homo sapiens
agacagaagtagacagtcaaggaga

SEQ ID NO: 4568 - DNA, 25 bp, Homo sapiens
ggagaactgtaccgacaaggactca

SEQ ID NO: 4569 - DNA, 24 bp, Homo sapiens
aattctaccgactgtaaaccgccg

SEQ ID NO: 4570 - DNA, 25 bp, Homo sapiens
tgacaatacgaacatgggcaaagtt

SEQ ID NO: 4571 - DNA, 25 bp, Homo sapiens
tcttacaattacattctcgaacttg

SEQ ID NO: 4572 - DNA, 25 bp, Homo sapiens
aacatcaatcaactctcgctagtgg

SEQ ID NO: 4573 - DNA, 25 bp, Homo sapiens
cgaacatgggcaaagttgtagaggg

SEQ ID NO: 4574 - DNA, 25 bp, Homo sapiens
tcttacaattacattctcgaacttg

SEQ ID NO: 4575 - DNA, 25 bp, Homo sapiens
aacatcaatcaactctcgctagtgg

SEQ ID NO: 4576 - DNA, 24 bp, Homo sapiens
gacaggacctcgtcaacgactcga

SEQ ID NO: 4577 - DNA, 24 bp, Homo sapiens
cagacctgacggacttcttagacg

SEQ ID NO: 4578 - DNA, 24 bp, Homo sapiens
gtagaacttttggaacccgcgaag

SEQ ID NO: 4579 - DNA, 24 bp, Homo sapiens
tagaacttttggaacccgcgaagg

SEQ ID NO: 4580 - DNA, 24 bp, Homo sapiens
ggtagaacttttggaacccgcgaa

SEQ ID NO: 4581 - DNA, 24 bp, Homo sapiens
gatctcttcctgacccgactggta

SEQ ID NO: 4582 - DNA, 25 bp, Homo sapiens
aaagatactaaagatactggtaacc

SEQ ID NO: 4583 - DNA, 25 bp, Homo sapiens
ctgcctactgaagaagtctgaccgt

SEQ ID NO: 4584 - DNA, 25 bp, Homo sapiens
ccttcctcctgtccatcgttagtcg

SEQ ID NO: 4585 - DNA, 25 bp, Homo sapiens
cgattggttaggacgacatcacggt

SEQ ID NO: 4586 - DNA, 25 bp, Homo sapiens
tagagcgtctcattcttctgttcag

SEQ ID NO: 4587 - DNA, 25 bp, Homo sapiens
gcggaacaaatcctaaacggactta

SEQ ID NO: 4588 - DNA, 25 bp, Homo sapiens
ccctcaactttcggaagaagaagaa

SEQ ID NO: 4589 - DNA, 25 bp, Homo sapiens
aggtgaaactctatcagtcgtcgga

SEQ ID NO: 4590 - DNA, 25 bp, Homo sapiens
tagagcgtctcattcttctgttcag

SEQ ID NO: 4591 - DNA, 25 bp, Homo sapiens
gcggaacaaatcctaaacggactta

SEQ ID NO: 4592 - DNA, 24 bp, Homo sapiens
ggtaagaagatctcgtaagtccgg

SEQ ID NO: 4593 - DNA, 24 bp, Homo sapiens
cgacgtaatgtacagacagttata

SEQ ID NO: 4594 - DNA, 24 bp, Homo sapiens
ggtccgtcccctcttacagaaaca

SEQ ID NO: 4595 - DNA, 25 bp, Homo sapiens
tgtgtaaatggtgtcagtagatgtt

SEQ ID NO: 4596 - DNA, 25 bp, Homo sapiens
tgtgttagctcattcaactgtctgt

SEQ ID NO: 4597 - DNA, 25 bp, Homo sapiens
ttatgaccgaaccacgatatgacaa

SEQ ID NO: 4598 - DNA, 25 bp, Homo sapiens
agtattaccgtgttcgtcctcgtta

SEQ ID NO: 4599 - DNA, 23 bp, Homo sapiens
ttttcggaaaggtttaagtatac

SEQ ID NO: 4600 - DNA, 24 bp, Homo sapiens
gatcataacgacggaagcttgtaa

SEQ ID NO: 4601 - DNA, 25 bp, Homo sapiens
aagaagtaatattaggtccaactgt

SEQ ID NO: 4602 - DNA, 25 bp, Homo sapiens
agtattaccgtgttcgtcctcgtta

SEQ ID NO: 4603 - DNA, 25 bp, Homo sapiens
agaacggattctcagaggtagaaga

SEQ ID NO: 4604 - DNA, 24 bp, Homo sapiens
agtaaaagtaacacaaggactcgt

SEQ ID NO: 4605 - DNA, 24 bp, Homo sapiens
acacgaaagagatctggaagagct

SEQ ID NO: 4606 - DNA, 24 bp, Homo sapiens
acaggagtagaacgggaagtggga

SEQ ID NO: 4607 - DNA, 24 bp, Homo sapiens
agtagtcggagtacaggtaggtct

SEQ ID NO: 4608 - DNA, 24 bp, Homo sapiens
ggtcttaaataggctgtgaggtcg

SEQ ID NO: 4609 - DNA, 24 bp, Homo sapiens
acagaaaggtgacggtccattagg

SEQ ID NO: 4610 - DNA, 24 bp, Homo sapiens
ccaggaagtatctgaccagccagt

SEQ ID NO: 4611 - DNA, 24 bp, Homo sapiens
ctccgaccaccgagtcacttcctc

SEQ ID NO: 4612 - DNA, 24 bp, Homo sapiens
agtccgaagaagagctgagcacct

SEQ ID NO: 4613 - DNA, 24 bp, Homo sapiens
ctccgaccaccgagtcacttcctc

SEQ ID NO: 4614 - DNA, 24 bp, Homo sapiens
agtccgaagaagagctgagcacct

SEQ ID NO: 4615 - DNA, 24 bp, Homo sapiens
aaggtgacggtccattaggagagt

SEQ ID NO: 4616 - DNA, 25 bp, Homo sapiens
cggttctaagtgttgtcttcccaga

SEQ ID NO: 4617 - DNA, 25 bp, Homo sapiens
gagtatcgtcagtatctttccgtga

SEQ ID NO: 4618 - DNA, 24 bp, Homo sapiens
tgtccacaacgaggtcggtaagag

SEQ ID NO: 4619 - DNA, 23 bp, Homo sapiens
gtttggattcttatgttcaaaag

SEQ ID NO: 4620 - DNA, 25 bp, Homo sapiens
acacttcttctcaccaaaacggacg

SEQ ID NO: 4621 - DNA, 24 bp, Homo sapiens
gtacaaccgggttagacagtagaa

SEQ ID NO: 4622 - DNA, 24 bp, Homo sapiens
gtcgcgctgcggaggtgaatataa

SEQ ID NO: 4623 - DNA, 24 bp, Homo sapiens
ggcttacgacagtcgaagtcctta

SEQ ID NO: 4624 - DNA, 24 bp, Homo sapiens
tcgattccggtgcctcgctctgta

SEQ ID NO: 4625 - DNA, 24 bp, Homo sapiens
aatggtctgcccgacttacatcag

SEQ ID NO: 4626 - DNA, 24 bp, Homo sapiens
atggtctgcccgacttacatcagt

SEQ ID NO: 4627 - DNA, 24 bp, Homo sapiens
aaatggtctgcccgacttacatca

SEQ ID NO: 4628 - DNA, 24 bp, Homo sapiens
tagacctgttcaaatggtctgccc

SEQ ID NO: 4629 - DNA, 24 bp, Homo sapiens
gaggaggtcgatgtcgtcggtttc

SEQ ID NO: 4630 - DNA, 24 bp, Homo sapiens
cgtgatgaaatttgtgttagggac

SEQ ID NO: 4631 - DNA, 24 bp, Homo sapiens
cgcgaccttggtgccctgtacaac

SEQ ID NO: 4632 - DNA, 24 bp, Homo sapiens
ccacttttttaccattacaccgcc

SEQ ID NO: 4633 - DNA, 24 bp, Homo sapiens
gagactgtcgatgactacattccg

SEQ ID NO: 4634 - DNA, 24 bp, Homo sapiens
gaccttaggttattaaacagtcca

SEQ ID NO: 4635 - DNA, 24 bp, Homo sapiens
agtcaatagaacttattcactcag

SEQ ID NO: 4636 - DNA, 23 bp, Homo sapiens
gcaagacagaacgaccagacacg

SEQ ID NO: 4637 - DNA, 25 bp, Homo sapiens
agtgacatggagtacaagtaacgga

SEQ ID NO: 4638 - DNA, 25 bp, Homo sapiens
cgtgacaagtgaaggaaccgtatta

SEQ ID NO: 4639 - DNA, 24 bp, Homo sapiens
tcaacgagaacatagacgaggttc

SEQ ID NO: 4640 - DNA, 24 bp, Homo sapiens
caacgagaacatagacgaggttct

SEQ ID NO: 4641 - DNA, 24 bp, Homo sapiens
gtcaacgagaacatagacgaggtt

SEQ ID NO: 4642 - DNA, 24 bp, Homo sapiens
tgttcgtggttggtacacgacccg

SEQ ID NO: 4643 - DNA, 24 bp, Homo sapiens
gttcgtggttggtacacgacccgc

SEQ ID NO: 4644 - DNA, 24 bp, Homo sapiens
atgttcgtggttggtacacgaccc

SEQ ID NO: 4645 - DNA, 24 bp, Homo sapiens
acggtccgtgtagatttgttaatt

SEQ ID NO: 4646 - DNA, 24 bp, Homo sapiens
cggtccgtgtagatttgttaattt

SEQ ID NO: 4647 - DNA, 24 bp, Homo sapiens
tacggtccgtgtagatttgttaat

SEQ ID NO: 4648 - DNA, 24 bp, Homo sapiens
ggtgagatcaaccatgtcctccaa

SEQ ID NO: 4649 - DNA, 24 bp, Homo sapiens
tcgtagaccagggaaacaaaagaa

SEQ ID NO: 4650 - DNA, 23 bp, Homo sapiens
ccttctaagttgtgagacctttc

SEQ ID NO: 4651 - DNA, 25 bp, Homo sapiens
tatttcttaggtgtctttcgacttt

SEQ ID NO: 4652 - DNA, 25 bp, Homo sapiens
agaccagaacttaccagtaacagaa

SEQ ID NO: 4653 - DNA, 25 bp, Homo sapiens
aaggttatttcttaggtgtctttcg

SEQ ID NO: 4654 - DNA, 25 bp, Homo sapiens
ccgaacttgaacttatagaccagaa

SEQ ID NO: 4655 - DNA, 25 bp, Homo sapiens
tgtagttgttagaaggatattgcga

SEQ ID NO: 4656 - DNA, 25 bp, Homo sapiens
gagactactcgtgaaggtgcagagg

SEQ ID NO: 4657 - DNA, 25 bp, Homo sapiens
accatttccacttttagttcgacgt

SEQ ID NO: 4658 - DNA, 25 bp, Homo sapiens
gtcagaaccaaaccgtctctttaca

SEQ ID NO: 4659 - DNA, 23 bp, Homo sapiens
cgacgctgaccttgaaaggggag

SEQ ID NO: 4660 - DNA, 23 bp, Homo sapiens
atccgaaacaaccctccagccgt

SEQ ID NO: 4661 - DNA, 25 bp, Homo sapiens
accgactacgaaagaaacagcagac

SEQ ID NO: 4662 - DNA, 24 bp, Homo sapiens
accgtttaggtttgaacctctaga

SEQ ID NO: 4663 - DNA, 24 bp, Homo sapiens
ccgtttaggtttgaacctctagaa

SEQ ID NO: 4664 - DNA, 24 bp, Homo sapiens
taccgtttaggtttgaacctctag

SEQ ID NO: 4665 - DNA, 25 bp, Homo sapiens
aagacgaagaagaagtccaggaggc

SEQ ID NO: 4666 - DNA, 23 bp, Homo sapiens
catccgaaacaaccctccagccg

SEQ ID NO: 4667 - DNA, 24 bp, Homo sapiens
aacagcagactgatggataccgtt

SEQ ID NO: 4668 - DNA, 25 bp, Homo sapiens
aagtaggagtagaaacgaagacctc

SEQ ID NO: 4669 - DNA, 24 bp, Homo sapiens
gcacttctggacctcgctgacttc

SEQ ID NO: 4670 - DNA, 25 bp, Homo sapiens
atcggtccaggatcggttaccagac

SEQ ID NO: 4671 - DNA, 25 bp, Homo sapiens
cgtcttaggtgcggtcatgttctag

SEQ ID NO: 4672 - DNA, 24 bp, Homo sapiens
gtaggtagtttggatgttcggtag

SEQ ID NO: 4673 - DNA, 24 bp, Homo sapiens
taggtagtttggatgttcggtagt

SEQ ID NO: 4674 - DNA, 24 bp, Homo sapiens
agtaggtagtttggatgttcggta

SEQ ID NO: 4675 - DNA, 24 bp, Homo sapiens
ttaccaggtgtattccgttccgtt

SEQ ID NO: 4676 - DNA, 23 bp, Homo sapiens
acgaaactacgcccgagcaaaga

SEQ ID NO: 4677 - DNA, 25 bp, Homo sapiens
acccgaagtcgttctacacctttga

SEQ ID NO: 4678 - DNA, 25 bp, Homo sapiens
ctctctgtgacttgctactagggta

SEQ ID NO: 4679 - DNA, 25 bp, Homo sapiens
ggagtatcctcgaaggtgacgttga

SEQ ID NO: 4680 - DNA, 25 bp, Homo sapiens
agaaagtgaagggtatgagcgagtt

SEQ ID NO: 4681 - DNA, 24 bp, Homo sapiens
tgttattggatggaccttcactca

SEQ ID NO: 4682 - DNA, 24 bp, Homo sapiens
gttattggatggaccttcactcac

SEQ ID NO: 4683 - DNA, 24 bp, Homo sapiens
ctgttattggatggaccttcactc

SEQ ID NO: 4684 - DNA, 24 bp, Homo sapiens
ctgtgtttaatggactcgtgttca

SEQ ID NO: 4685 - DNA, 24 bp, Homo sapiens
tgtgtttaatggactcgtgttcag

SEQ ID NO: 4686 - DNA, 24 bp, Homo sapiens
cctgtgtttaatggactcgtgttc

SEQ ID NO: 4687 - DNA, 24 bp, Homo sapiens
ccggtagtgtcggacgtacggaag

SEQ ID NO: 4688 - DNA, 24 bp, Homo sapiens
cggtagtgtcggacgtacggaaga

SEQ ID NO: 4689 - DNA, 24 bp, Homo sapiens
accggtagtgtcggacgtacggaa

SEQ ID NO: 4690 - DNA, 24 bp, Homo sapiens
tcggtctgagtggacgaggcagga

SEQ ID NO: 4691 - DNA, 24 bp, Homo sapiens
cggtctgagtggacgaggcaggac

SEQ ID NO: 4692 - DNA, 24 bp, Homo sapiens
ttcggtctgagtggacgaggcagg

SEQ ID NO: 4693 - DNA, 25 bp, Homo sapiens
acggtcttcaactgataatgagtca

SEQ ID NO: 4694 - DNA, 25 bp, Homo sapiens
tagaatagttctttaacacaaaggg

SEQ ID NO: 4695 - DNA, 25 bp, Homo sapiens
aggcttaaacggagagttacagaga

SEQ ID NO: 4696 - DNA, 24 bp, Homo sapiens
aagacgaagttcaacgagtcagtt

SEQ ID NO: 4697 - DNA, 25 bp, Homo sapiens
atgattcgatgagaggtagttgtgt

SEQ ID NO: 4698 - DNA, 24 bp, Homo sapiens
tgaaactcaacggaaagaccacta

SEQ ID NO: 4699 - DNA, 24 bp, Homo sapiens
gaaactcaacggaaagaccactac

SEQ ID NO: 4700 - DNA, 24 bp, Homo sapiens
ttgaaactcaacggaaagaccact

SEQ ID NO: 4701 - DNA, 25 bp, Homo sapiens
ttacggacaagagaacacacgatga

SEQ ID NO: 4702 - DNA, 25 bp, Homo sapiens
gctatgggcgaaagttacagagaca

SEQ ID NO: 4703 - DNA, 23 bp, Homo sapiens
acgaagaggacgacgcctgactt

SEQ ID NO: 4704 - DNA, 25 bp, Homo sapiens
gctatgggcgaaagttacagagaca

SEQ ID NO: 4705 - DNA, 23 bp, Homo sapiens
acgaagaggacgacgcctgactt

SEQ ID NO: 4706 - DNA, 25 bp, Homo sapiens
ctactgaacttgtcacagataacgc

SEQ ID NO: 4707 - DNA, 25 bp, Homo sapiens
agaggagaaggcgaacactgaaggt

SEQ ID NO: 4708 - DNA, 25 bp, Homo sapiens
ttacggacaagagaacacacgatga

SEQ ID NO: 4709 - DNA, 25 bp, Homo sapiens
ctattagagcgagtaagttcctgga

SEQ ID NO: 4710 - DNA, 24 bp, Homo sapiens
aagtgtttcttggacacggtagtc

SEQ ID NO: 4711 - DNA, 24 bp, Homo sapiens
agtgtttcttggacacggtagtcg

SEQ ID NO: 4712 - DNA, 24 bp, Homo sapiens
caagtgtttcttggacacggtagt

SEQ ID NO: 4713 - DNA, 24 bp, Homo sapiens
acgtaaagcccggtaccacagcga

SEQ ID NO: 4714 - DNA, 24 bp, Homo sapiens
cgtaaagcccggtaccacagcgat

SEQ ID NO: 4715 - DNA, 24 bp, Homo sapiens
gacgtaaagcccggtaccacagcg

SEQ ID NO: 4716 - DNA, 25 bp, Homo sapiens
tggtcgtaagacttagactcggtga

SEQ ID NO: 4717 - DNA, 25 bp, Homo sapiens
ggtcacaggaaagagggaatcgtcg

SEQ ID NO: 4718 - DNA, 24 bp, Homo sapiens
tggagccaaaggaccctgaagaaa

SEQ ID NO: 4719 - DNA, 23 bp, Homo sapiens
cggaagtactcgagtcgtgcaca

SEQ ID NO: 4720 - DNA, 25 bp, Homo sapiens
agtagaagtagatccattggtatca

SEQ ID NO: 4721 - DNA, 23 bp, Homo sapiens
aagaggagaacggtcggctcgga

SEQ ID NO: 4722 - DNA, 24 bp, Homo sapiens
tggagccaaaggaccctgaagaaa

SEQ ID NO: 4723 - DNA, 25 bp, Homo sapiens
cgagagattgtggtccgtttagaaa

SEQ ID NO: 4724 - DNA, 25 bp, Homo sapiens
gaaagaccctcctccttctccaaga

SEQ ID NO: 4725 - DNA, 25 bp, Homo sapiens
tggtcgtaagacttagactcggtga

SEQ ID NO: 4726 - DNA, 25 bp, Homo sapiens
ggtcacaggaaagagggaatcgtcg

SEQ ID NO: 4727 - DNA, 25 bp, Homo sapiens
gaaagaccctcctccttctccaaga

SEQ ID NO: 4728 - DNA, 25 bp, Homo sapiens
aagaactaacgtccaaggtgaaccg

SEQ ID NO: 4729 - DNA, 25 bp, Homo sapiens
aacggatgaacgaagaaagtagtga

SEQ ID NO: 4730 - DNA, 25 bp, Homo sapiens
gtctgttgaaccgaaggactagaga

SEQ ID NO: 4731 - DNA, 25 bp, Homo sapiens
aacctagacatcagcaagtacatga

SEQ ID NO: 4732 - DNA, 24 bp, Homo sapiens
aagttgaatagcaagagccgaagg

SEQ ID NO: 4733 - DNA, 25 bp, Homo sapiens
cgtccaaggtgaaccgatagaacca

SEQ ID NO: 4734 - DNA, 24 bp, Homo sapiens
gtatgtgaagtggtatccgagacg

SEQ ID NO: 4735 - DNA, 25 bp, Homo sapiens
agccacttcttacaagagacctaga

SEQ ID NO: 4736 - DNA, 25 bp, Homo sapiens
tgaatgaagggacaatgactctggt

SEQ ID NO: 4737 - DNA, 24 bp, Homo sapiens
caagtggtatcggatcccctcccc

SEQ ID NO: 4738 - DNA, 24 bp, Homo sapiens
aagtggtatcggatcccctcccct

SEQ ID NO: 4739 - DNA, 24 bp, Homo sapiens
tcaagtggtatcggatcccctccc

SEQ ID NO: 4740 - DNA, 25 bp, Homo sapiens
tcacactacggaatctcgaagtacg

SEQ ID NO: 4741 - DNA, 23 bp, Homo sapiens
gagggtccgtcgtaggtggaagg

SEQ ID NO: 4742 - DNA, 25 bp, Homo sapiens
agtcctgtctctagttcaccgctaa

SEQ ID NO: 4743 - DNA, 25 bp, Homo sapiens
ggaacccttaggagaaaccgtttag

SEQ ID NO: 4744 - DNA, 25 bp, Homo sapiens
cgtacacataggtccgtaacttatt

SEQ ID NO: 4745 - DNA, 25 bp, Homo sapiens
cgtcgatcttatgtcgtaggcgaga

SEQ ID NO: 4746 - DNA, 25 bp, Homo sapiens
cgtcgatcttatgtcgtaggcgaga

SEQ ID NO: 4747 - DNA, 24 bp, Homo sapiens
cgtcagttgagtaggggtaacaga

SEQ ID NO: 4748 - DNA, 25 bp, Homo sapiens
tacgacgaaccctacatgaagaagt

SEQ ID NO: 4749 - DNA, 25 bp, Homo sapiens
agattcgtagggtcagaaactggtt

SEQ ID NO: 4750 - DNA, 25 bp, Homo sapiens
cgtaaaccaacttctccaaattact

SEQ ID NO: 4751 - DNA, 24 bp, Homo sapiens
tgtttttgaatggagaaagcacgg

SEQ ID NO: 4752 - DNA, 24 bp, Homo sapiens
gtttttgaatggagaaagcacggg

SEQ ID NO: 4753 - DNA, 24 bp, Homo sapiens
ttgtttttgaatggagaaagcacg

SEQ ID NO: 4754 - DNA, 24 bp, Homo sapiens
tcaaacgacactgagctaggagct

SEQ ID NO: 4755 - DNA, 24 bp, Homo sapiens
caaacgacactgagctaggagctg

SEQ ID NO: 4756 - DNA, 24 bp, Homo sapiens
gtcaaacgacactgagctaggagc

SEQ ID NO: 4757 - DNA, 25 bp, Homo sapiens
cgaagtagacggttatacggtaact

SEQ ID NO: 4758 - DNA, 25 bp, Homo sapiens
gaagcaatgttcgatccacccgttt

SEQ ID NO: 4759 - DNA, 25 bp, Homo sapiens
tgttgaagagtgttgttgttctacc

SEQ ID NO: 4760 - DNA, 24 bp, Homo sapiens
atgtgcacatgcgtcgcgacttct

SEQ ID NO: 4761 - DNA, 24 bp, Homo sapiens
tgtgcacatgcgtcgcgacttctc

SEQ ID NO: 4762 - DNA, 24 bp, Homo sapiens
catgtgcacatgcgtcgcgacttc

SEQ ID NO: 4763 - DNA, 23 bp, Homo sapiens
caccagcgtcccgtctgtctgcc

SEQ ID NO: 4764 - DNA, 25 bp, Homo sapiens
tgtcatccccgtatagtagacgaga

SEQ ID NO: 4765 - DNA, 25 bp, Homo sapiens
gacctctcttaagcagaccgttccg

SEQ ID NO: 4766 - DNA, 23 bp, Homo sapiens
ttacggcttgacgacttgttagg

SEQ ID NO: 4767 - DNA, 25 bp, Homo sapiens
gtaaggaacctgtgtacctgtacga

SEQ ID NO: 4768 - DNA, 25 bp, Homo sapiens
cgataagaacaacgtgacattgcac

SEQ ID NO: 4769 - DNA, 25 bp, Homo sapiens
tgaactcaaagggtaagtaggtagt

SEQ ID NO: 4770 - DNA, 25 bp, Homo sapiens
agtttccgatgtttcttagaccttt

SEQ ID NO: 4771 - DNA, 25 bp, Homo sapiens
ttctttcctgtcgagtcagttctgt

SEQ ID NO: 4772 - DNA, 25 bp, Homo sapiens
tggtattggtatttccgactcttca

SEQ ID NO: 4773 - DNA, 25 bp, Homo sapiens
agtggaagaagaaggagaagaagga

SEQ ID NO: 4774 - DNA, 25 bp, Homo sapiens
cggtgacaacagtagtaatagtcgt

SEQ ID NO: 4775 - DNA, 24 bp, Homo sapiens
cgtagtggtccttgttgttgtact

SEQ ID NO: 4776 - DNA, 24 bp, Homo sapiens
cttaggtcgtaggtaactcttagg

SEQ ID NO: 4777 - DNA, 24 bp, Homo sapiens
gacaactcggacgaagacgcacct

SEQ ID NO: 4778 - DNA, 24 bp, Homo sapiens
cgaggttcaagaagacactttagg

SEQ ID NO: 4779 - DNA, 24 bp, Homo sapiens
ggagttctgacctgtcggatatcg

SEQ ID NO: 4780 - DNA, 23 bp, Homo sapiens
tcctgtggccctggcggagagga

SEQ ID NO: 4781 - DNA, 25 bp, Homo sapiens
accagtcgtgaagtgttagtggacc

SEQ ID NO: 4782 - DNA, 25 bp, Homo sapiens
gacggtaaaaggataaaacaaagtt

SEQ ID NO: 4783 - DNA, 24 bp, Homo sapiens
tccgaccgtgtagttgacagaacc

SEQ ID NO: 4784 - DNA, 25 bp, Homo sapiens
aggactaacaatactccaccacaac

SEQ ID NO: 4785 - DNA, 25 bp, Homo sapiens
ccgaggaggaactggttactgtcta

SEQ ID NO: 4786 - DNA, 25 bp, Homo sapiens
tggtgtttgagtcgataaggggtct

SEQ ID NO: 4787 - DNA, 24 bp, Homo sapiens
aagtgtagaacgacttcgtctcaa

SEQ ID NO: 4788 - DNA, 25 bp, Homo sapiens
tagtctactcaaaggtatcgaagaa

SEQ ID NO: 4789 - DNA, 25 bp, Homo sapiens
tgactggtgtagtttatctttacgg

SEQ ID NO: 4790 - DNA, 25 bp, Homo sapiens
taggtggcctcatgatagtcaacgt

SEQ ID NO: 4791 - DNA, 25 bp, Homo sapiens
gtgtagatagtatagtgtcgtctcg

SEQ ID NO: 4792 - DNA, 24 bp, Homo sapiens
tatgtcctctaggaatcgtcgaac

SEQ ID NO: 4793 - DNA, 24 bp, Homo sapiens
atgtcctctaggaatcgtcgaact

SEQ ID NO: 4794 - DNA, 24 bp, Homo sapiens
ctatgtcctctaggaatcgtcgaa

SEQ ID NO: 4795 - DNA, 24 bp, Homo sapiens
cggtttataagtcgaaggtcaagg

SEQ ID NO: 4796 - DNA, 24 bp, Homo sapiens
ggtttataagtcgaaggtcaagga

SEQ ID NO: 4797 - DNA, 24 bp, Homo sapiens
acggtttataagtcgaaggtcaag

SEQ ID NO: 4798 - DNA, 25 bp, Homo sapiens
acaccctagaacagtaagatagtct

SEQ ID NO: 4799 - DNA, 25 bp, Homo sapiens
ttggttaagataacattagtagacg

SEQ ID NO: 4800 - DNA, 25 bp, Homo sapiens
acatcttaggactcaaggatttcgt

SEQ ID NO: 4801 - DNA, 25 bp, Homo sapiens
actatgaggttttctttacaagcaa

SEQ ID NO: 4802 - DNA, 24 bp, Homo sapiens
ggtcaaggacaaagtagaaacact

SEQ ID NO: 4803 - DNA, 24 bp, Homo sapiens
aacacttaagaaggaagcagtaac

SEQ ID NO: 4804 - DNA, 24 bp, Homo sapiens
acacttaagaaggaagcagtaact

SEQ ID NO: 4805 - DNA, 24 bp, Homo sapiens
aaacacttaagaaggaagcagtaa

SEQ ID NO: 4806 - DNA, 25 bp, Homo sapiens
accgttacttgagaaacacacttgt

SEQ ID NO: 4807 - DNA, 25 bp, Homo sapiens
aaggagtacaacggcttgttgactt

SEQ ID NO: 4808 - DNA, 25 bp, Homo sapiens
cagaaccaccacgaccaccttacta

SEQ ID NO: 4809 - DNA, 25 bp, Homo sapiens
ccttgtgaagtacgtagcgttgaca

SEQ ID NO: 4810 - DNA, 23 bp, Homo sapiens
agagttttatcctacacgacggt

SEQ ID NO: 4811 - DNA, 23 bp, Homo sapiens
aggttcttctgtacctttaaatt

SEQ ID NO: 4812 - DNA, 25 bp, Homo sapiens
aggactttgctaatgaggtagacga

SEQ ID NO: 4813 - DNA, 25 bp, Homo sapiens
acaagcaagcacgagtttctttagt

SEQ ID NO: 4814 - DNA, 23 bp, Homo sapiens
agaagtagtcgtctgtgagcacg

SEQ ID NO: 4815 - DNA, 24 bp, Homo sapiens
actttagttaaggctaccacctct

SEQ ID NO: 4816 - DNA, 24 bp, Homo sapiens
ctttagttaaggctaccacctcta

SEQ ID NO: 4817 - DNA, 24 bp, Homo sapiens
aactttagttaaggctaccacctc

SEQ ID NO: 4818 - DNA, 24 bp, Homo sapiens
caaccaaacaaggaaagacggact

SEQ ID NO: 4819 - DNA, 24 bp, Homo sapiens
tctggagaacatccgccgattatt

SEQ ID NO: 4820 - DNA, 24 bp, Homo sapiens
tgaaccacagtgatcgtctcctcc

SEQ ID NO: 4821 - DNA, 24 bp, Homo sapiens
actacctgaattgagtgttctgac

SEQ ID NO: 4822 - DNA, 24 bp, Homo sapiens
ctacctgaattgagtgttctgacg

SEQ ID NO: 4823 - DNA, 24 bp, Homo sapiens
aactacctgaattgagtgttctga

SEQ ID NO: 4824 - DNA, 25 bp, Homo sapiens
acaacgaaaactacttacctaactg

SEQ ID NO: 4825 - DNA, 24 bp, Homo sapiens
tctacatgaagacgatatacaccg

SEQ ID NO: 4826 - DNA, 24 bp, Homo sapiens
agagaacagttcaacggaagacga

SEQ ID NO: 4827 - DNA, 24 bp, Homo sapiens
ccacttagactctcggtacgttcc

SEQ ID NO: 4828 - DNA, 24 bp, Homo sapiens
gccattatgttcgcttgaggttca

SEQ ID NO: 4829 - DNA, 24 bp, Homo sapiens
tctacatgaagacgatatacaccg

SEQ ID NO: 4830 - DNA, 24 bp, Homo sapiens
agagaacagttcaacggaagacga

SEQ ID NO: 4831 - DNA, 25 bp, Homo sapiens
cgatagaagcgtcagcgatcttgtt

SEQ ID NO: 4832 - DNA, 23 bp, Homo sapiens
atgaaccgtgactgtagccaagg

SEQ ID NO: 4833 - DNA, 25 bp, Homo sapiens
cctcatggaattgaaagtggtcgga

SEQ ID NO: 4834 - DNA, 24 bp, Homo sapiens
catagtaggcacaacgtaaattgc

SEQ ID NO: 4835 - DNA, 24 bp, Homo sapiens
atagtaggcacaacgtaaattgcg

SEQ ID NO: 4836 - DNA, 24 bp, Homo sapiens
ccatagtaggcacaacgtaaattg

SEQ ID NO: 4837 - DNA, 23 bp, Homo sapiens
gacgttagtcgaagaattccagg

SEQ ID NO: 4838 - DNA, 25 bp, Homo sapiens
gaagtcctgttagaacaaggttgcc

SEQ ID NO: 4839 - DNA, 24 bp, Homo sapiens
tcaggatgtatggacgtgcaggtg

SEQ ID NO: 4840 - DNA, 24 bp, Homo sapiens
caggatgtatggacgtgcaggtga

SEQ ID NO: 4841 - DNA, 24 bp, Homo sapiens
ctcaggatgtatggacgtgcaggt

SEQ ID NO: 4842 - DNA, 24 bp, Homo sapiens
gtagtgtgtatgggtcggaggcaa

SEQ ID NO: 4843 - DNA, 24 bp, Homo sapiens
tagtgtgtatgggtcggaggcaaa

SEQ ID NO: 4844 - DNA, 24 bp, Homo sapiens
ggtagtgtgtatgggtcggaggca

SEQ ID NO: 4845 - DNA, 24 bp, Homo sapiens
ccgaggacgactcttgtctccgac

SEQ ID NO: 4846 - DNA, 24 bp, Homo sapiens
tcttctcctttcgtatcgtggtag

SEQ ID NO: 4847 - DNA, 24 bp, Homo sapiens
cactcggaaccactctgcgaatcc

SEQ ID NO: 4848 - DNA, 25 bp, Homo sapiens
taacaatttcaactttcacttacac

SEQ ID NO: 4849 - DNA, 23 bp, Homo sapiens
ttcagagtacggcaggagactgg

SEQ ID NO: 4850 - DNA, 25 bp, Homo sapiens
taacacgtacgcgaggtggagtatt

SEQ ID NO: 4851 - DNA, 24 bp, Homo sapiens
aatagacgagactaagctgaccaa

SEQ ID NO: 4852 - DNA, 24 bp, Homo sapiens
tcaaaggttcaggacttggttacg

SEQ ID NO: 4853 - DNA, 24 bp, Homo sapiens
aggacaactcgaactcactggtag

SEQ ID NO: 4854 - DNA, 24 bp, Homo sapiens
aggactatcgtaggtttactcggt

SEQ ID NO: 4855 - DNA, 25 bp, Homo sapiens
aaggaatagtagtctgctggtcggt

SEQ ID NO: 4856 - DNA, 23 bp, Homo sapiens
gagtccaagtcgtcgttcgtgac

SEQ ID NO: 4857 - DNA, 25 bp, Homo sapiens
agaccttaacttggtgctggacctt

SEQ ID NO: 4858 - DNA, 25 bp, Homo sapiens
aaccgaagtatctcatcagaacgaa

SEQ ID NO: 4859 - DNA, 24 bp, Homo sapiens
caccgtgaattgtaccgtagaagc

SEQ ID NO: 4860 - DNA, 24 bp, Homo sapiens
ggtctaccacctaagaatccctaa

SEQ ID NO: 4861 - DNA, 24 bp, Homo sapiens
cgtcacctagaacatctttcgcaa

SEQ ID NO: 4862 - DNA, 24 bp, Homo sapiens
cgaacaacatgaccaaggtagaga

SEQ ID NO: 4863 - DNA, 24 bp, Homo sapiens
tcctttcaccatctcacatcctta

SEQ ID NO: 4864 - DNA, 24 bp, Homo sapiens
ctctccaaaccgtgtccgtagtgt

SEQ ID NO: 4865 - DNA, 24 bp, Homo sapiens
cgaacaacatgaccaaggtagaga

SEQ ID NO: 4866 - DNA, 24 bp, Homo sapiens
ctctccaaaccgtgtccgtagtgt

SEQ ID NO: 4867 - DNA, 24 bp, Homo sapiens
caccgtgaattgtaccgtagaagc

SEQ ID NO: 4868 - DNA, 24 bp, Homo sapiens
acatagtggttcgcaaaggctcgt

SEQ ID NO: 4869 - DNA, 24 bp, Homo sapiens
agtaggacataaacccacacaaca

SEQ ID NO: 4870 - DNA, 24 bp, Homo sapiens
tttactatagagacaaacagtgtg

SEQ ID NO: 4871 - DNA, 24 bp, Homo sapiens
acgcgtctgatagtatagggggag

SEQ ID NO: 4872 - DNA, 24 bp, Homo sapiens
gtggtataaaaccgtcaagcacac

SEQ ID NO: 4873 - DNA, 24 bp, Homo sapiens
gacgtcgtattaaacagtccggtt

SEQ ID NO: 4874 - DNA, 24 bp, Homo sapiens
gcaggcgacgagctgtctctggac

SEQ ID NO: 4875 - DNA, 24 bp, Homo sapiens
acatagtggttcgcaaaggctcgt

SEQ ID NO: 4876 - DNA, 24 bp, Homo sapiens
aacagtgtgcttgatagtaggaca

SEQ ID NO: 4877 - DNA, 23 bp, Homo sapiens
ggtggtcgtagttggaagaaccg

SEQ ID NO: 4878 - DNA, 25 bp, Homo sapiens
ttatggacggttaaggagactgttc

SEQ ID NO: 4879 - DNA, 23 bp, Homo sapiens
atggcggcaagaacagtggtggt

SEQ ID NO: 4880 - DNA, 25 bp, Homo sapiens
aagaccacacaagaagcatctcctt

SEQ ID NO: 4881 - DNA, 23 bp, Homo sapiens
gtggaacggtggtcgtagttgga

SEQ ID NO: 4882 - DNA, 23 bp, Homo sapiens
cccgaaggggaagaacccgaaaa

SEQ ID NO: 4883 - DNA, 23 bp, Homo sapiens
tggacggttaaggagactgttcc

SEQ ID NO: 4884 - DNA, 24 bp, Homo sapiens
atgtaccggaaagaccttatgtac

SEQ ID NO: 4885 - DNA, 24 bp, Homo sapiens
tgtaccggaaagaccttatgtacc

SEQ ID NO: 4886 - DNA, 24 bp, Homo sapiens
catgtaccggaaagaccttatgta

SEQ ID NO: 4887 - DNA, 23 bp, Homo sapiens
ggtggtcgtagttggaagaaccg

SEQ ID NO: 4888 - DNA, 25 bp, Homo sapiens
ttatggacggttaaggagactgttc

SEQ ID NO: 4889 - DNA, 25 bp, Homo sapiens
ggagaacatgtaccggaaagacctt

SEQ ID NO: 4890 - DNA, 23 bp, Homo sapiens
cggtggtcgtagttggaagaacc

SEQ ID NO: 4891 - DNA, 23 bp, Homo sapiens
cccgaaggggaagaacccgaaaa

SEQ ID NO: 4892 - DNA, 25 bp, Homo sapiens
ttatggacggttaaggagactgttc

SEQ ID NO: 4893 - DNA, 23 bp, Homo sapiens
ggacaccgcaggtcactcctact

SEQ ID NO: 4894 - DNA, 25 bp, Homo sapiens
tccaggtcagtgttcattattcggt

SEQ ID NO: 4895 - DNA, 25 bp, Homo sapiens
aagaccacacaagaagcatctcctt

SEQ ID NO: 4896 - DNA, 24 bp, Homo sapiens
ttcccaaagaccgtgtcgtccttg

SEQ ID NO: 4897 - DNA, 24 bp, Homo sapiens
aacccgtttgaagaaagagtccgc

SEQ ID NO: 4898 - DNA, 24 bp, Homo sapiens
gtccatgtatcttcaacggtcgaa

SEQ ID NO: 4899 - DNA, 24 bp, Homo sapiens
ttcccaaagaccgtgtcgtccttg

SEQ ID NO: 4900 - DNA, 24 bp, Homo sapiens
aacccgtttgaagaaagagtccgc

SEQ ID NO: 4901 - DNA, 24 bp, Homo sapiens
tattcgaaggaggaacggaaagct

SEQ ID NO: 4902 - DNA, 24 bp, Homo sapiens
ttctaaactgcttccgcttcttcg

SEQ ID NO: 4903 - DNA, 24 bp, Homo sapiens
ctcgtatgtgtctggagtagaaca

SEQ ID NO: 4904 - DNA, 25 bp, Homo sapiens
gagcgtcatctgcgtcgtttctttc

SEQ ID NO: 4905 - DNA, 24 bp, Homo sapiens
agtaagagcgtcatctgcgtcgtt

SEQ ID NO: 4906 - DNA, 25 bp, Homo sapiens
acacgcagggaagtctcattacagc

SEQ ID NO: 4907 - DNA, 25 bp, Homo sapiens
actacactaacttcagggaggcgtc

SEQ ID NO: 4908 - DNA, 23 bp, Homo sapiens
cagctgtcagactaacgactctt

SEQ ID NO: 4909 - DNA, 23 bp, Homo sapiens
cgggaagtgctattgacacgcag

SEQ ID NO: 4910 - DNA, 25 bp, Homo sapiens
actacactaacttcagggaggcgtc

SEQ ID NO: 4911 - DNA, 24 bp, Homo sapiens
tctgtctcaaacgcctacgcttca

SEQ ID NO: 4912 - DNA, 24 bp, Homo sapiens
ggtcgtggtgtatcttcaggtccg

SEQ ID NO: 4913 - DNA, 24 bp, Homo sapiens
agaacagacgctacgactttggac

SEQ ID NO: 4914 - DNA, 24 bp, Homo sapiens
ggtaacgaaccggacgcgtgtgga

SEQ ID NO: 4915 - DNA, 24 bp, Homo sapiens
gtaacgaaccggacgcgtgtggac

SEQ ID NO: 4916 - DNA, 24 bp, Homo sapiens
gggtaacgaaccggacgcgtgtgg

SEQ ID NO: 4917 - DNA, 24 bp, Homo sapiens
ccgtcgtaggtactaaggtagaag

SEQ ID NO: 4918 - DNA, 24 bp, Homo sapiens
gggaggtggttccaagggtcgaaa

SEQ ID NO: 4919 - DNA, 24 bp, Homo sapiens
gtgccactagaacgagaacgagga

SEQ ID NO: 4920 - DNA, 24 bp, Homo sapiens
gtaccgccgtcgcctcaatctttc

SEQ ID NO: 4921 - DNA, 24 bp, Homo sapiens
ccgtcgtaggtactaaggtagaag

SEQ ID NO: 4922 - DNA, 24 bp, Homo sapiens
gtgccactagaacgagaacgagga

SEQ ID NO: 4923 - DNA, 24 bp, Homo sapiens
tctcacttgaagtcttgaacgaag

SEQ ID NO: 4924 - DNA, 24 bp, Homo sapiens
ccgtcgtaggtactaaggtagaag

SEQ ID NO: 4925 - DNA, 24 bp, Homo sapiens
gtgccactagaacgagaacgagga

SEQ ID NO: 4926 - DNA, 24 bp, Homo sapiens
tctcacttgaagtcttgaacgaag

SEQ ID NO: 4927 - DNA, 24 bp, Homo sapiens
ccgtcgtaggtactaaggtagaag

SEQ ID NO: 4928 - DNA, 24 bp, Homo sapiens
ggcaagtgaaactaggaaagaacg

SEQ ID NO: 4929 - DNA, 24 bp, Homo sapiens
gtgtcgagctggaagtaccgctgt

SEQ ID NO: 4930 - DNA, 24 bp, Homo sapiens
tgtcgagctggaagtaccgctgtc

SEQ ID NO: 4931 - DNA, 24 bp, Homo sapiens
cgtgtcgagctggaagtaccgctg

SEQ ID NO: 4932 - DNA, 24 bp, Homo sapiens
ctgtcaggtcaaatagacggctcc

SEQ ID NO: 4933 - DNA, 24 bp, Homo sapiens
taaactgacgagccgcccaagaaa

SEQ ID NO: 4934 - DNA, 24 bp, Homo sapiens
cgggactatcgaacaagagcaact

SEQ ID NO: 4935 - DNA, 24 bp, Homo sapiens
acctttcctttcggctgagcgtaa

SEQ ID NO: 4936 - DNA, 24 bp, Homo sapiens
ctgtcaggtcaaatagacggctcc

SEQ ID NO: 4937 - DNA, 24 bp, Homo sapiens
taaactgacgagccgcccaagaaa

SEQ ID NO: 4938 - DNA, 23 bp, Homo sapiens
gtgtcgagctggaagtaccgctg

SEQ ID NO: 4939 - DNA, 22 bp, Homo sapiens
tgtcgagctggaagtaccgctg

SEQ ID NO: 4940 - DNA, 24 bp, Homo sapiens
cgtgtcgagctggaagtaccgctg

SEQ ID NO: 4941 - DNA, 24 bp, Homo sapiens
ttgacgtgtcgagctggaagtacc

SEQ ID NO: 4942 - DNA, 24 bp, Homo sapiens
acctttcctttcggctgagcgtaa

SEQ ID NO: 4943 - DNA, 24 bp, Homo sapiens
ctgtcaggtcaaatagacggctcc

SEQ ID NO: 4944 - DNA, 24 bp, Homo sapiens
tgaacgggtaaagccgtcgttggt

SEQ ID NO: 4945 - DNA, 24 bp, Homo sapiens
gaacgggtaaagccgtcgttggtg

SEQ ID NO: 4946 - DNA, 24 bp, Homo sapiens
ttgaacgggtaaagccgtcgttgg

SEQ ID NO: 4947 - DNA, 24 bp, Homo sapiens
acgccctcggtaagacgtcgcagg

SEQ ID NO: 4948 - DNA, 24 bp, Homo sapiens
cgccctcggtaagacgtcgcaggt

SEQ ID NO: 4949 - DNA, 24 bp, Homo sapiens
aacgccctcggtaagacgtcgcag

SEQ ID NO: 4950 - DNA, 24 bp, Homo sapiens
aagaacttcgggtgaggtacctac

SEQ ID NO: 4951 - DNA, 24 bp, Homo sapiens
agaacttcgggtgaggtacctacg

SEQ ID NO: 4952 - DNA, 24 bp, Homo sapiens
gaagaacttcgggtgaggtaccta

SEQ ID NO: 4953 - DNA, 24 bp, Homo sapiens
tgccgggaaaaagaagagcggtgg

SEQ ID NO: 4954 - DNA, 24 bp, Homo sapiens
aagagcccaatggtgaagcaacta

SEQ ID NO: 4955 - DNA, 24 bp, Homo sapiens
gtacctacgcgaacacttacaact

SEQ ID NO: 4956 - DNA, 24 bp, Homo sapiens
ttagagaaactcacgggctccacg

SEQ ID NO: 4957 - DNA, 24 bp, Homo sapiens
aaacaactcggaccacagttacgc

SEQ ID NO: 4958 - DNA, 24 bp, Homo sapiens
cgtgtgcctaagccataccgtgta

SEQ ID NO: 4959 - DNA, 24 bp, Homo sapiens
aaagaagagcggtgggaagaaacg

SEQ ID NO: 4960 - DNA, 24 bp, Homo sapiens
ccaatggtgaagcaactaccgtct

SEQ ID NO: 4961 - DNA, 24 bp, Homo sapiens
ggcttagagaaactcacgggctcc

SEQ ID NO: 4962 - DNA, 24 bp, Homo sapiens
ccaatggtgaagcaactaccgtct

SEQ ID NO: 4963 - DNA, 24 bp, Homo sapiens
ggcttagagaaactcacgggctcc

SEQ ID NO: 4964 - DNA, 24 bp, Homo sapiens
cgtgtgcctaagccataccgtgta

SEQ ID NO: 4965 - DNA, 24 bp, Homo sapiens
ggcgtgtgcctaagccataccgtg

SEQ ID NO: 4966 - DNA, 24 bp, Homo sapiens
aatgcaaaagacctgtcggcgtgt

SEQ ID NO: 4967 - DNA, 24 bp, Homo sapiens
atgcaaaagacctgtcggcgtgtg

SEQ ID NO: 4968 - DNA, 24 bp, Homo sapiens
taatgcaaaagacctgtcggcgtg

SEQ ID NO: 4969 - DNA, 24 bp, Homo sapiens
ttagagaaactcacgggctccacg

SEQ ID NO: 4970 - DNA, 24 bp, Homo sapiens
ctcaagggtagaggaagtaccgtt

SEQ ID NO: 4971 - DNA, 24 bp, Homo sapiens
aaacaactcggaccacagttacgc

SEQ ID NO: 4972 - DNA, 24 bp, Homo sapiens
tgccgggaaaaagaagagcggtgg

SEQ ID NO: 4973 - DNA, 24 bp, Homo sapiens
aagagcccaatggtgaagcaacta

SEQ ID NO: 4974 - DNA, 24 bp, Homo sapiens
acgtcgcaggttcaacctttcctt

SEQ ID NO: 4975 - DNA, 24 bp, Homo sapiens
ggcttagagaaactcacgggctcc

SEQ ID NO: 4976 - DNA, 24 bp, Homo sapiens
acctcaagggtagaggaagtaccg

SEQ ID NO: 4977 - DNA, 24 bp, Homo sapiens
aaacaactcggaccacagttacgc

SEQ ID NO: 4978 - DNA, 24 bp, Homo sapiens
acgtcgcaggttcaacctttcctt

SEQ ID NO: 4979 - DNA, 24 bp, Homo sapiens
aaagaagagcggtgggaagaaacg

SEQ ID NO: 4980 - DNA, 24 bp, Homo sapiens
ccaatggtgaagcaactaccgtct

SEQ ID NO: 4981 - DNA, 24 bp, Homo sapiens
ggaagaaacgccctcggtaagacg

SEQ ID NO: 4982 - DNA, 24 bp, Homo sapiens
ccaatggtgaagcaactaccgtct

SEQ ID NO: 4983 - DNA, 24 bp, Homo sapiens
ggcttagagaaactcacgggctcc

SEQ ID NO: 4984 - DNA, 23 bp, Homo sapiens
acgtctgttgcaggggccttctc

SEQ ID NO: 4985 - DNA, 24 bp, Homo sapiens
aagactgagacacgaacacggaag

SEQ ID NO: 4986 - DNA, 24 bp, Homo sapiens
gactccactccatcgaggtcgtgt

SEQ ID NO: 4987 - DNA, 25 bp, Homo sapiens
acctttctctacgtgtgttgaccga

SEQ ID NO: 4988 - DNA, 24 bp, Homo sapiens
gaagaaggaggtgaaccgagagta

SEQ ID NO: 4989 - DNA, 24 bp, Homo sapiens
aagaaggaggtgaaccgagagtac

SEQ ID NO: 4990 - DNA, 24 bp, Homo sapiens
cgaagaaggaggtgaaccgagagt

SEQ ID NO: 4991 - DNA, 24 bp, Homo sapiens
cgcgtctccaaaggtttttttacc

SEQ ID NO: 4992 - DNA, 24 bp, Homo sapiens
gcgtctccaaaggtttttttaccg

SEQ ID NO: 4993 - DNA, 24 bp, Homo sapiens
ccgcgtctccaaaggtttttttac

SEQ ID NO: 4994 - DNA, 23 bp, Homo sapiens
aaccgagagtaccgcgtctccaa

SEQ ID NO: 4995 - DNA, 24 bp, Homo sapiens
tccctgcaattggtacgaacgcac

SEQ ID NO: 4996 - DNA, 24 bp, Homo sapiens
ccctgcaattggtacgaacgcact

SEQ ID NO: 4997 - DNA, 24 bp, Homo sapiens
atccctgcaattggtacgaacgca

SEQ ID NO: 4998 - DNA, 24 bp, Homo sapiens
cagtctcatgccgaggaccctgcg

SEQ ID NO: 4999 - DNA, 24 bp, Homo sapiens
agtctcatgccgaggaccctgcga

SEQ ID NO: 5000 - DNA, 24 bp, Homo sapiens
acagtctcatgccgaggaccctgc

SEQ ID NO: 5001 - DNA, 24 bp, Homo sapiens
aaaacatgccgaaaaagctcaacc

SEQ ID NO: 5002 - DNA, 24 bp, Homo sapiens
cgcccccggttagaaccacaaccg

SEQ ID NO: 5003 - DNA, 24 bp, Homo sapiens
gcccccggttagaaccacaaccgt

SEQ ID NO: 5004 - DNA, 24 bp, Homo sapiens
ccgcccccggttagaaccacaacc

SEQ ID NO: 5005 - DNA, 24 bp, Homo sapiens
tccgtagttgtagagacgccgacg

SEQ ID NO: 5006 - DNA, 24 bp, Homo sapiens
ccgtagttgtagagacgccgacgt

SEQ ID NO: 5007 - DNA, 24 bp, Homo sapiens
atccgtagttgtagagacgccgac

SEQ ID NO: 5008 - DNA, 24 bp, Homo sapiens
cctgaactctctgacgtaccggaa

SEQ ID NO: 5009 - DNA, 24 bp, Homo sapiens
ctgaactctctgacgtaccggaag

SEQ ID NO: 5010 - DNA, 24 bp, Homo sapiens
ccctgaactctctgacgtaccgga

SEQ ID NO: 5011 - DNA, 24 bp, Homo sapiens
acagccgtggtccaccgtgtcgtg

SEQ ID NO: 5012 - DNA, 24 bp, Homo sapiens
cagccgtggtccaccgtgtcgtga

SEQ ID NO: 5013 - DNA, 24 bp, Homo sapiens
aacagccgtggtccaccgtgtcgt

SEQ ID NO: 5014 - DNA, 24 bp, Homo sapiens
ccgtctacttccattagtgcctct

SEQ ID NO: 5015 - DNA, 24 bp, Homo sapiens
agaacactcagagcgtccagcgag

SEQ ID NO: 5016 - DNA, 24 bp, Homo sapiens
tcgtgaggcagacatccatagaga

SEQ ID NO: 5017 - DNA, 24 bp, Homo sapiens
agaacactcagagcgtccagcgag

SEQ ID NO: 5018 - DNA, 24 bp, Homo sapiens
tcgtgaggcagacatccatagaga

SEQ ID NO: 5019 - DNA, 24 bp, Homo sapiens
gagccgaaagaacagccgtggtcc

SEQ ID NO: 5020 - DNA, 24 bp, Homo sapiens
gaggtccgtttgacaaggaagtgc

SEQ ID NO: 5021 - DNA, 24 bp, Homo sapiens
ccgtctacttccattagtgcctct

SEQ ID NO: 5022 - DNA, 24 bp, Homo sapiens
gtcagagacctgccgatgccgcat

SEQ ID NO: 5023 - DNA, 24 bp, Homo sapiens
gaaggggagaacactcagagcgtc

SEQ ID NO: 5024 - DNA, 24 bp, Homo sapiens
acttccaacccgtgtaagaacaga

SEQ ID NO: 5025 - DNA, 24 bp, Homo sapiens
atcggagccctgaactctctgacg

SEQ ID NO: 5026 - DNA, 24 bp, Homo sapiens
ccgtctacttccattagtgcctct

SEQ ID NO: 5027 - DNA, 24 bp, Homo sapiens
atcggagccctgaactctctgacg

SEQ ID NO: 5028 - DNA, 24 bp, Homo sapiens
ccgtctacttccattagtgcctct

SEQ ID NO: 5029 - DNA, 24 bp, Homo sapiens
agaacactcagagcgtccagcgag

SEQ ID NO: 5030 - DNA, 25 bp, Homo sapiens
tcagtgtgccgtctaccaaaggaac

SEQ ID NO: 5031 - DNA, 24 bp, Homo sapiens
ccactcctaagtagagccagacgg

SEQ ID NO: 5032 - DNA, 24 bp, Homo sapiens
gcctcaaactacacatcccgccac

SEQ ID NO: 5033 - DNA, 24 bp, Homo sapiens
ccactcctaagtagagccagacgg

SEQ ID NO: 5034 - DNA, 24 bp, Homo sapiens
gcctcaaactacacatcccgccac

SEQ ID NO: 5035 - DNA, 23 bp, Homo sapiens
ccactgtaggagttaggcgggct

SEQ ID NO: 5036 - DNA, 24 bp, Homo sapiens
ctagtggggtgtgaacaaatcgga

SEQ ID NO: 5037 - DNA, 24 bp, Homo sapiens
tagtggggtgtgaacaaatcggac

SEQ ID NO: 5038 - DNA, 24 bp, Homo sapiens
actagtggggtgtgaacaaatcgg

SEQ ID NO: 5039 - DNA, 25 bp, Homo sapiens
gtaacaactatgagaactctcgtag

SEQ ID NO: 5040 - DNA, 23 bp, Homo sapiens
ttcgtggaccgcaaacggagaga

SEQ ID NO: 5041 - DNA, 23 bp, Homo sapiens
gcctgctactgaaacctcgtgcc

SEQ ID NO: 5042 - DNA, 24 bp, Homo sapiens
gtaccaggtactacggtcgactcc

SEQ ID NO: 5043 - DNA, 24 bp, Homo sapiens
taccaggtactacggtcgactcca

SEQ ID NO: 5044 - DNA, 24 bp, Homo sapiens
agtaccaggtactacggtcgactc

SEQ ID NO: 5045 - DNA, 25 bp, Homo sapiens
aagggaggacacacaaaagcagaac

SEQ ID NO: 5046 - DNA, 25 bp, Homo sapiens
taatgtagggatctttttcttaggg

SEQ ID NO: 5047 - DNA, 23 bp, Homo sapiens
cttcgtggtctcaggtactccgt

SEQ ID NO: 5048 - DNA, 25 bp, Homo sapiens
ctaccgtctgcctactttaacctcg

SEQ ID NO: 5049 - DNA, 24 bp, Homo sapiens
tcacgatgagtggccgcgcctttc

SEQ ID NO: 5050 - DNA, 24 bp, Homo sapiens
cacgatgagtggccgcgcctttct

SEQ ID NO: 5051 - DNA, 24 bp, Homo sapiens
ctcacgatgagtggccgcgccttt

SEQ ID NO: 5052 - DNA, 25 bp, Homo sapiens
aaaggtccagaaactcaacgtgcag

SEQ ID NO: 5053 - DNA, 25 bp, Homo sapiens
accgccctaccttcgtctaataaga

SEQ ID NO: 5054 - DNA, 24 bp, Homo sapiens
aagcagaacgaagaagtaccaggt

SEQ ID NO: 5055 - DNA, 24 bp, Homo sapiens
taaaagggtcgagacaccagtagt

SEQ ID NO: 5056 - DNA, 24 bp, Homo sapiens
aaaagggtcgagacaccagtagtt

SEQ ID NO: 5057 - DNA, 24 bp, Homo sapiens
ttaaaagggtcgagacaccagtag

SEQ ID NO: 5058 - DNA, 23 bp, Homo sapiens
gggtgtgaacaaatcggacggac

SEQ ID NO: 5059 - DNA, 25 bp, Homo sapiens
accgccctaccttcgtctaataaga

SEQ ID NO: 5060 - DNA, 24 bp, Homo sapiens
aagcagaacgaagaagtaccaggt

SEQ ID NO: 5061 - DNA, 23 bp, Homo sapiens
gtaccaggtactacggtcgactc

SEQ ID NO: 5062 - DNA, 25 bp, Homo sapiens
aagggaggacacacaaaagcagaac

SEQ ID NO: 5063 - DNA, 25 bp, Homo sapiens
taatgtagggatctttttcttaggg

SEQ ID NO: 5064 - DNA, 24 bp, Homo sapiens
agaactctcgtagacggtcctgta

SEQ ID NO: 5065 - DNA, 23 bp, Homo sapiens
cgtggaccgcaaacggagagaaa

SEQ ID NO: 5066 - DNA, 23 bp, Homo sapiens
gcctgctactgaaacctcgtgcc

SEQ ID NO: 5067 - DNA, 23 bp, Homo sapiens
gtaccaggtactacggtcgactc

SEQ ID NO: 5068 - DNA, 25 bp, Homo sapiens
aagggaggacacacaaaagcagaac

SEQ ID NO: 5069 - DNA, 23 bp, Homo sapiens
cttcgtggtctcaggtactccgt

SEQ ID NO: 5070 - DNA, 24 bp, Homo sapiens
gttccgactctggagtccttgtat

SEQ ID NO: 5071 - DNA, 24 bp, Homo sapiens
ttccgactctggagtccttgtatt

SEQ ID NO: 5072 - DNA, 24 bp, Homo sapiens
ggttccgactctggagtccttgta

SEQ ID NO: 5073 - DNA, 24 bp, Homo sapiens
tgacggcttcaggttttcgaagtc

SEQ ID NO: 5074 - DNA, 24 bp, Homo sapiens
gacggcttcaggttttcgaagtcg

SEQ ID NO: 5075 - DNA, 24 bp, Homo sapiens
ctgacggcttcaggttttcgaagt

SEQ ID NO: 5076 - DNA, 24 bp, Homo sapiens
actggacttccaacctgtctgacg

SEQ ID NO: 5077 - DNA, 24 bp, Homo sapiens
ctagtgatctctgtaccgacgtcg

SEQ ID NO: 5078 - DNA, 24 bp, Homo sapiens
tagtgatctctgtaccgacgtcgt

SEQ ID NO: 5079 - DNA, 24 bp, Homo sapiens
cctagtgatctctgtaccgacgtc

SEQ ID NO: 5080 - DNA, 24 bp, Homo sapiens
gtgtgcaaggtggagtaggagtca

SEQ ID NO: 5081 - DNA, 24 bp, Homo sapiens
tgtgcaaggtggagtaggagtcac

SEQ ID NO: 5082 - DNA, 24 bp, Homo sapiens
agtgtgcaaggtggagtaggagtc

SEQ ID NO: 5083 - DNA, 24 bp, Homo sapiens
gcctgtgcttccggggtcttcact

SEQ ID NO: 5084 - DNA, 24 bp, Homo sapiens
cctgtgcttccggggtcttcactg

SEQ ID NO: 5085 - DNA, 24 bp, Homo sapiens
agcctgtgcttccggggtcttcac

SEQ ID NO: 5086 - DNA, 24 bp, Homo sapiens
cgcacatccggaggacaccttctc

SEQ ID NO: 5087 - DNA, 24 bp, Homo sapiens
cgaacaacaggtctggtaaccgat

SEQ ID NO: 5088 - DNA, 24 bp, Homo sapiens
agaagaagtcagcgaggtccagaa

SEQ ID NO: 5089 - DNA, 24 bp, Homo sapiens
gcacatccggaggacaccttctct

SEQ ID NO: 5090 - DNA, 24 bp, Homo sapiens
taggaattttcggtaccgacaacg

SEQ ID NO: 5091 - DNA, 24 bp, Homo sapiens
aggaattttcggtaccgacaacgc

SEQ ID NO: 5092 - DNA, 23 bp, Homo sapiens
taggaattttcggtaccgacaac

SEQ ID NO: 5093 - DNA, 24 bp, Homo sapiens
ctggaacagttggagccggtgcaa

SEQ ID NO: 5094 - DNA, 24 bp, Homo sapiens
tggaacagttggagccggtgcaag

SEQ ID NO: 5095 - DNA, 24 bp, Homo sapiens
actggaacagttggagccggtgca

SEQ ID NO: 5096 - DNA, 24 bp, Homo sapiens
caagacgtaaagctccgacccgac

SEQ ID NO: 5097 - DNA, 24 bp, Homo sapiens
accgtggctactacgctaacgatc

SEQ ID NO: 5098 - DNA, 24 bp, Homo sapiens
cggtgcaagtagacctacctacgc

SEQ ID NO: 5099 - DNA, 24 bp, Homo sapiens
caagacgtaaagctccgacccgac

SEQ ID NO: 5100 - DNA, 24 bp, Homo sapiens
gccgtgcatgtccaggtgcttgag

SEQ ID NO: 5101 - DNA, 24 bp, Homo sapiens
cgcaccaggaaccgtggctactac

SEQ ID NO: 5102 - DNA, 24 bp, Homo sapiens
ctacctacgcaccaggaaccgtgg

SEQ ID NO: 5103 - DNA, 24 bp, Homo sapiens
gtctgtggcgtcggagcagttcta

SEQ ID NO: 5104 - DNA, 24 bp, Homo sapiens
ggtcgcaggaagaagaagaacagc

SEQ ID NO: 5105 - DNA, 24 bp, Homo sapiens
gtgacccagaaacagaaagaaccg

SEQ ID NO: 5106 - DNA, 24 bp, Homo sapiens
cggctgaaaggtcgcaggaagaag

SEQ ID NO: 5107 - DNA, 24 bp, Homo sapiens
gcctaaacaagtgacccagaaaca

SEQ ID NO: 5108 - DNA, 24 bp, Homo sapiens
catccgaccgtctcctgtcacctc

SEQ ID NO: 5109 - DNA, 24 bp, Homo sapiens
ccttgtaggaagacattcggaacg

SEQ ID NO: 5110 - DNA, 24 bp, Homo sapiens
tttgatggcaaacacgtaccgatt

SEQ ID NO: 5111 - DNA, 24 bp, Homo sapiens
ttgatggcaaacacgtaccgattt

SEQ ID NO: 5112 - DNA, 24 bp, Homo sapiens
ttttgatggcaaacacgtaccgat

SEQ ID NO: 5113 - DNA, 24 bp, Homo sapiens
agaactgagtctcacgaaaatcac

SEQ ID NO: 5114 - DNA, 24 bp, Homo sapiens
gaactgagtctcacgaaaatcacg

SEQ ID NO: 5115 - DNA, 24 bp, Homo sapiens
tagaactgagtctcacgaaaatca

SEQ ID NO: 5116 - DNA, 24 bp, Homo sapiens
gaggtggcgtctaccgcctagctt

SEQ ID NO: 5117 - DNA, 23 bp, Homo sapiens
ggggcattcccaaaagtgctttt

SEQ ID NO: 5118 - DNA, 24 bp, Homo sapiens
ttagacgtaaaaccaccgccgagg

SEQ ID NO: 5119 - DNA, 24 bp, Homo sapiens
cactaccagaaggggcattcccaa

SEQ ID NO: 5120 - DNA, 24 bp, Homo sapiens
agatagcataggctcccaagttgg

SEQ ID NO: 5121 - DNA, 24 bp, Homo sapiens
cgaccactgggtagaacgagagtc

SEQ ID NO: 5122 - DNA, 25 bp, Homo sapiens
ttgtctgtgctgttctcgctcttgg

SEQ ID NO: 5123 - DNA, 23 bp, Homo sapiens
ctgcctttgtgaccgccgtgtat

SEQ ID NO: 5124 - DNA, 24 bp, Homo sapiens
gacgaccactgggtagaacgagag

SEQ ID NO: 5125 - DNA, 23 bp, Homo sapiens
ggcttaaaagcgcccaccgaggt

SEQ ID NO: 5126 - DNA, 24 bp, Homo sapiens
ggtataaaggcctagtctggcacg

SEQ ID NO: 5127 - DNA, 23 bp, Homo sapiens
ctgcctttgtgaccgccgtgtat

SEQ ID NO: 5128 - DNA, 23 bp, Homo sapiens
gaattactttggctataggaagc

SEQ ID NO: 5129 - DNA, 24 bp, Homo sapiens
cgaccactgggtagaacgagagtc

SEQ ID NO: 5130 - DNA, 23 bp, Homo sapiens
ctcgctcttgggaccggcttaaa

SEQ ID NO: 5131 - DNA, 25 bp, Homo sapiens
cgaatataagttggaacctgaagcg

SEQ ID NO: 5132 - DNA, 25 bp, Homo sapiens
cggtcatgtcctttcgagatgggct

SEQ ID NO: 5133 - DNA, 24 bp, Homo sapiens
tgacagttcaactcgacgtaatca

SEQ ID NO: 5134 - DNA, 24 bp, Homo sapiens
gaggtcgagccagttgtactacgg

SEQ ID NO: 5135 - DNA, 24 bp, Homo sapiens
acatctgccgtacctttaagggga

SEQ ID NO: 5136 - DNA, 24 bp, Homo sapiens
gccagagatcgttaaagaagtcca

SEQ ID NO: 5137 - DNA, 24 bp, Homo sapiens
aagaggtcgagccagttgtactac

SEQ ID NO: 5138 - DNA, 24 bp, Homo sapiens
tccagtagggacatctgccgtacc

SEQ ID NO: 5139 - DNA, 24 bp, Homo sapiens
tgactcctgtgagccagagatcgt

SEQ ID NO: 5140 - DNA, 24 bp, Homo sapiens
actttctgtcgactgttctctgta

SEQ ID NO: 5141 - DNA, 24 bp, Homo sapiens
agactttctgtcgactgttctctg

SEQ ID NO: 5142 - DNA, 24 bp, Homo sapiens
aagaggtcgagccagttgtactac

SEQ ID NO: 5143 - DNA, 24 bp, Homo sapiens
agtccctcatgaacaccatctgca

SEQ ID NO: 5144 - DNA, 24 bp, Homo sapiens
tccagtagggacatctgccgtacc

SEQ ID NO: 5145 - DNA, 24 bp, Homo sapiens
aagaggtcgagccagttgtactac

SEQ ID NO: 5146 - DNA, 24 bp, Homo sapiens
ggacatctgccgtacctttaaggg

SEQ ID NO: 5147 - DNA, 24 bp, Homo sapiens
gagccagagatcgttaaagaagtc

SEQ ID NO: 5148 - DNA, 24 bp, Homo sapiens
gagatacaacgcaaggtcgacgct

SEQ ID NO: 5149 - DNA, 24 bp, Homo sapiens
gtctcataaccaccttccacaact

SEQ ID NO: 5150 - DNA, 24 bp, Homo sapiens
gaccaagtcccacagacccacggg

SEQ ID NO: 5151 - DNA, 24 bp, Homo sapiens
cacaggtccaggaggtactacaca

SEQ ID NO: 5152 - DNA, 24 bp, Homo sapiens
ggtccaatcggagcggtagtcgta

SEQ ID NO: 5153 - DNA, 24 bp, Homo sapiens
cagtgggagcacgtagaagagcac

SEQ ID NO: 5154 - DNA, 24 bp, Homo sapiens
cggtgacaccagaatcccccacgg

SEQ ID NO: 5155 - DNA, 24 bp, Homo sapiens
gaccggaggactaatcaccgacac

SEQ ID NO: 5156 - DNA, 24 bp, Homo sapiens
accaccttccacaactactaccag

SEQ ID NO: 5157 - DNA, 24 bp, Homo sapiens
cacaggtccaggaggtactacaca

SEQ ID NO: 5158 - DNA, 24 bp, Homo sapiens
ggtccaatcggagcggtagtcgta

SEQ ID NO: 5159 - DNA, 24 bp, Homo sapiens
accaccttccacaactactaccag

SEQ ID NO: 5160 - DNA, 24 bp, Homo sapiens
gaccaagtcccacagacccacggg

SEQ ID NO: 5161 - DNA, 24 bp, Homo sapiens
tagaaaagcgtggtcgagaaactt

SEQ ID NO: 5162 - DNA, 24 bp, Homo sapiens
cggctcctcggtgtgtctcacaaa

SEQ ID NO: 5163 - DNA, 24 bp, Homo sapiens
cacaggtccaggaggtactacaca

SEQ ID NO: 5164 - DNA, 24 bp, Homo sapiens
ggtccaatcggagcggtagtcgta

SEQ ID NO: 5165 - DNA, 24 bp, Homo sapiens
gaccaacccatctccgtcccaccg

SEQ ID NO: 5166 - DNA, 24 bp, Homo sapiens
accgacagagatcaaggcagtacc

SEQ ID NO: 5167 - DNA, 24 bp, Homo sapiens
gaaccagtcccagacgcacgacgg

SEQ ID NO: 5168 - DNA, 24 bp, Homo sapiens
gaggaagaggtagtcgtggaactc

SEQ ID NO: 5169 - DNA, 24 bp, Homo sapiens
cgtatcaccgtggacgagcccgcc

SEQ ID NO: 5170 - DNA, 24 bp, Homo sapiens
gtatcaccgtggacgagcccgccg

SEQ ID NO: 5171 - DNA, 24 bp, Homo sapiens
acgtatcaccgtggacgagcccgc

SEQ ID NO: 5172 - DNA, 24 bp, Homo sapiens
cattgtcgaatggacagtgcttac

SEQ ID NO: 5173 - DNA, 24 bp, Homo sapiens
attgtcgaatggacagtgcttacc

SEQ ID NO: 5174 - DNA, 24 bp, Homo sapiens
tcattgtcgaatggacagtgctta

SEQ ID NO: 5175 - DNA, 24 bp, Homo sapiens
tgagtcgcagtgaaagtaaatccg

SEQ ID NO: 5176 - DNA, 25 bp, Homo sapiens
ttcaattcaggtctcaagaggttgc

SEQ ID NO: 5177 - DNA, 25 bp, Homo sapiens
gtgacccaaagtaaactcctgccaa

SEQ ID NO: 5178 - DNA, 23 bp, Homo sapiens
ccatgtggcaaggacgaaccgac

SEQ ID NO: 5179 - DNA, 24 bp, Homo sapiens
tccatcgtcgggtgaggtgtagaa

SEQ ID NO: 5180 - DNA, 25 bp, Homo sapiens
ttcaattcaggtctcaagaggttgc

SEQ ID NO: 5181 - DNA, 24 bp, Homo sapiens
tccatcgtcgggtgaggtgtagaa

SEQ ID NO: 5182 - DNA, 25 bp, Homo sapiens
ttcaattcaggtctcaagaggttgc

SEQ ID NO: 5183 - DNA, 25 bp, Homo sapiens
aggtcttcctgtgagaagtatccgt

SEQ ID NO: 5184 - DNA, 24 bp, Homo sapiens
gaaccgagagtggaacggtattaa

SEQ ID NO: 5185 - DNA, 24 bp, Homo sapiens
aaccgagagtggaacggtattaag

SEQ ID NO: 5186 - DNA, 24 bp, Homo sapiens
cgaaccgagagtggaacggtatta

SEQ ID NO: 5187 - DNA, 24 bp, Homo sapiens
aggtattcagggagacccacgaga

SEQ ID NO: 5188 - DNA, 24 bp, Homo sapiens
aacaatacggtgaactactcgaga

SEQ ID NO: 5189 - DNA, 24 bp, Homo sapiens
acaatacggtgaactactcgagac

SEQ ID NO: 5190 - DNA, 24 bp, Homo sapiens
gaacaatacggtgaactactcgag

SEQ ID NO: 5191 - DNA, 23 bp, Homo sapiens
atatacccacccgtaagagaggt

SEQ ID NO: 5192 - DNA, 25 bp, Homo sapiens
gtgacaaagatatacccacccgtaa

SEQ ID NO: 5193 - DNA, 25 bp, Homo sapiens
tggaagagacacacccagggttagt

SEQ ID NO: 5194 - DNA, 23 bp, Homo sapiens
tgataggtacctcagtgaccgaa

SEQ ID NO: 5195 - DNA, 24 bp, Homo sapiens
acctcagtgaccgaaactccctgt

SEQ ID NO: 5196 - DNA, 25 bp, Homo sapiens
gccaatgaacatggtagacttgtcg

SEQ ID NO: 5197 - DNA, 23 bp, Homo sapiens
ctgaaccgcactttaggcatacg

SEQ ID NO: 5198 - DNA, 25 bp, Homo sapiens
agtccacaaaaaaagacggtaactg

SEQ ID NO: 5199 - DNA, 25 bp, Homo sapiens
cggtaactgactcaagtcgccaatt

SEQ ID NO: 5200 - DNA, 24 bp, Homo sapiens
tttccatgagtggtaggtacagtt

SEQ ID NO: 5201 - DNA, 24 bp, Homo sapiens
tttccatgagtggtaggtacagtt

SEQ ID NO: 5202 - DNA, 24 bp, Homo sapiens
ctttccatgagtggtaggtacagt

SEQ ID NO: 5203 - DNA, 25 bp, Homo sapiens
aaccaatcacttcacccttctgaca

SEQ ID NO: 5204 - DNA, 25 bp, Homo sapiens
actaccaaccgataaactgaagaga

SEQ ID NO: 5205 - DNA, 25 bp, Homo sapiens
cgtttactccacctagatcgttgtt

SEQ ID NO: 5206 - DNA, 25 bp, Homo sapiens
acaagcatttagactttgacgaaca

SEQ ID NO: 5207 - DNA, 25 bp, Homo sapiens
accagagtagaactagagggaccga

SEQ ID NO: 5208 - DNA, 25 bp, Homo sapiens
taagaacctcagacactacaaacgg

SEQ ID NO: 5209 - DNA, 25 bp, Homo sapiens
gtacgacatggagtcactagaccta

SEQ ID NO: 5210 - DNA, 25 bp, Homo sapiens
ccaaagagtcagggtagttgccaaa

SEQ ID NO: 5211 - DNA, 24 bp, Homo sapiens
gtactaccacaacggttgacacgg

SEQ ID NO: 5212 - DNA, 23 bp, Homo sapiens
cccaagcccaaagagacgaaccc

SEQ ID NO: 5213 - DNA, 25 bp, Homo sapiens
accagagtaacccttgtccaacact

SEQ ID NO: 5214 - DNA, 25 bp, Homo sapiens
ttcaactactgtaaactaccctcgt

SEQ ID NO: 5215 - DNA, 24 bp, Homo sapiens
ccaaccacccaagcccaaagagac

SEQ ID NO: 5216 - DNA, 24 bp, Homo sapiens
aagtgtaatggttcttgagtgtcg

SEQ ID NO: 5217 - DNA, 24 bp, Homo sapiens
tctattaccttcttcgtaggcgga

SEQ ID NO: 5218 - DNA, 24 bp, Homo sapiens
tcagtagtgaagacgactcatccg

SEQ ID NO: 5219 - DNA, 25 bp, Homo sapiens
cgaaggagacgaaggttagaaattg

SEQ ID NO: 5220 - DNA, 24 bp, Homo sapiens
gagaagtgtcgctgaagacggtca

SEQ ID NO: 5221 - DNA, 23 bp, Homo sapiens
ttactccatcacggtggttgtcg

SEQ ID NO: 5222 - DNA, 24 bp, Homo sapiens
ttgaccgaagagggatcagacacc

SEQ ID NO: 5223 - DNA, 25 bp, Homo sapiens
agagaaggagttcaagggagagaag

SEQ ID NO: 5224 - DNA, 25 bp, Homo sapiens
gcttgtcattgtcggtgtagtccta

SEQ ID NO: 5225 - DNA, 24 bp, Homo sapiens
aagctgacagtagactctatgctc

SEQ ID NO: 5226 - DNA, 24 bp, Homo sapiens
agctgacagtagactctatgctct

SEQ ID NO: 5227 - DNA, 24 bp, Homo sapiens
caagctgacagtagactctatgct

SEQ ID NO: 5228 - DNA, 24 bp, Homo sapiens
cggtgagtaaagaaggtgagagaa

SEQ ID NO: 5229 - DNA, 24 bp, Homo sapiens
ggtgagtaaagaaggtgagagaat

SEQ ID NO: 5230 - DNA, 24 bp, Homo sapiens
tcggtgagtaaagaaggtgagaga

SEQ ID NO: 5231 - DNA, 24 bp, Homo sapiens
tgatgacacactacctcttcctcg

SEQ ID NO: 5232 - DNA, 25 bp, Homo sapiens
gacctccaaccgacataagacacct

SEQ ID NO: 5233 - DNA, 25 bp, Homo sapiens
acgattgcacgataatatggttccg

SEQ ID NO: 5234 - DNA, 25 bp, Homo sapiens
ttcattgtgacgaggttcagaagtt

SEQ ID NO: 5235 - DNA, 24 bp, Homo sapiens
gctgacagtagactctatgctctg

SEQ ID NO: 5236 - DNA, 25 bp, Homo sapiens
gaagaaacattgaggtcgttagcgt

SEQ ID NO: 5237 - DNA, 24 bp, Homo sapiens
gagaaggttttgtgaatcgaggaa

SEQ ID NO: 5238 - DNA, 25 bp, Homo sapiens
tcggtgagtaaagaaggtgagagaa

SEQ ID NO: 5239 - DNA, 25 bp, Homo sapiens
tccgtgacacgataggagtgactgt

SEQ ID NO: 5240 - DNA, 23 bp, Homo sapiens
gctgacagtagactctatgctct

SEQ ID NO: 5241 - DNA, 25 bp, Homo sapiens
cgtccagtaaagtaagagtcccatt

SEQ ID NO: 5242 - DNA, 25 bp, Homo sapiens
ttgtccaagaataccattgatgagg

SEQ ID NO: 5243 - DNA, 25 bp, Homo sapiens
acctagaagtccagtgtcgagttga

SEQ ID NO: 5244 - DNA, 25 bp, Homo sapiens
ggagtagtcaaggtcgagaacaagg

SEQ ID NO: 5245 - DNA, 24 bp, Homo sapiens
cgaacatgaactcagtggtctaca

SEQ ID NO: 5246 - DNA, 25 bp, Homo sapiens
acacgacagagaaggttccagaagt

SEQ ID NO: 5247 - DNA, 24 bp, Homo sapiens
cgaaacggtaaaccattctctccc

SEQ ID NO: 5248 - DNA, 25 bp, Homo sapiens
tgacacaaggactttcgtacatggt

SEQ ID NO: 5249 - DNA, 23 bp, Homo sapiens
ctagagacgagaagtctaacaga

SEQ ID NO: 5250 - DNA, 25 bp, Homo sapiens
gtacctagaagtccagtgtcgagtt

SEQ ID NO: 5251 - DNA, 25 bp, Homo sapiens
aaggagtagtcaaggtcgagaacaa

SEQ ID NO: 5252 - DNA, 25 bp, Homo sapiens
aggcaaacaaaccgaaagacatcaa

SEQ ID NO: 5253 - DNA, 25 bp, Homo sapiens
gtggacgactcaaaggtggagacag

SEQ ID NO: 5254 - DNA, 25 bp, Homo sapiens
acctagaagtccagtgtcgagttga

SEQ ID NO: 5255 - DNA, 25 bp, Homo sapiens
ggagtagtcaaggtcgagaacaagg

SEQ ID NO: 5256 - DNA, 24 bp, Homo sapiens
tacctagaagtccagtgtcgagtt

SEQ ID NO: 5257 - DNA, 25 bp, Homo sapiens
aggagtagtcaaggtcgagaacaag

SEQ ID NO: 5258 - DNA, 23 bp, Homo sapiens
atcaagataaaactctagcgatg

SEQ ID NO: 5259 - DNA, 25 bp, Homo sapiens
acctagaagtccagtgtcgagttga

SEQ ID NO: 5260 - DNA, 25 bp, Homo sapiens
ggagtagtcaaggtcgagaacaagg

SEQ ID NO: 5261 - DNA, 25 bp, Homo sapiens
aggcaaacaaaccgaaagacatcaa

SEQ ID NO: 5262 - DNA, 24 bp, Homo sapiens
agctagtactctgaatccgtcttt

SEQ ID NO: 5263 - DNA, 24 bp, Homo sapiens
gctagtactctgaatccgtctttt

SEQ ID NO: 5264 - DNA, 24 bp, Homo sapiens
tagctagtactctgaatccgtctt

SEQ ID NO: 5265 - DNA, 24 bp, Homo sapiens
accgtgtgagtggtctagacaata

SEQ ID NO: 5266 - DNA, 24 bp, Homo sapiens
ccgtgtgagtggtctagacaataa

SEQ ID NO: 5267 - DNA, 24 bp, Homo sapiens
taccgtgtgagtggtctagacaat

SEQ ID NO: 5268 - DNA, 25 bp, Homo sapiens
ccacttaaacaactccagggaacga

SEQ ID NO: 5269 - DNA, 25 bp, Homo sapiens
acctcccatccaactcactacgaca

SEQ ID NO: 5270 - DNA, 25 bp, Homo sapiens
acaaggtactcgactatgtgagacg

SEQ ID NO: 5271 - DNA, 25 bp, Homo sapiens
acctcccatccaactcactacgaca

SEQ ID NO: 5272 - DNA, 25 bp, Homo sapiens
acaaggtactcgactatgtgagacg

SEQ ID NO: 5273 - DNA, 25 bp, Homo sapiens
acaaccagagactccagaaggaagg

SEQ ID NO: 5274 - DNA, 23 bp, Homo sapiens
gcggaggcgttgaaagaccagta

SEQ ID NO: 5275 - DNA, 24 bp, Homo sapiens
tcctctcctacctctacgaccaga

SEQ ID NO: 5276 - DNA, 25 bp, Homo sapiens
tgtcaaacggtagaagataggctcg

SEQ ID NO: 5277 - DNA, 24 bp, Homo sapiens
attcattatcccaaaagtccgtcg

SEQ ID NO: 5278 - DNA, 24 bp, Homo sapiens
ttcattatcccaaaagtccgtcgt

SEQ ID NO: 5279 - DNA, 24 bp, Homo sapiens
tattcattatcccaaaagtccgtc

SEQ ID NO: 5280 - DNA, 24 bp, Homo sapiens
aatccttattggctgtgtaaaagt

SEQ ID NO: 5281 - DNA, 24 bp, Homo sapiens
atccttattggctgtgtaaaagta

SEQ ID NO: 5282 - DNA, 24 bp, Homo sapiens
taatccttattggctgtgtaaaag

SEQ ID NO: 5283 - DNA, 25 bp, Homo sapiens
acctcattctgtagcttgaagactc

SEQ ID NO: 5284 - DNA, 24 bp, Homo sapiens
aaggctagtcatcgcatcttctcg

SEQ ID NO: 5285 - DNA, 24 bp, Homo sapiens
ccagactccaatttccagaggtga

SEQ ID NO: 5286 - DNA, 23 bp, Homo sapiens
aagtcaagacgaggttcaggcga

SEQ ID NO: 5287 - DNA, 25 bp, Homo sapiens
gtgacacggagtcgttgtaagtctt

SEQ ID NO: 5288 - DNA, 24 bp, Homo sapiens
aaggctagtcatcgcatcttctcg

SEQ ID NO: 5289 - DNA, 24 bp, Homo sapiens
ccagactccaatttccagaggtga

SEQ ID NO: 5290 - DNA, 25 bp, Homo sapiens
gtgacacggagtcgttgtaagtctt

SEQ ID NO: 5291 - DNA, 24 bp, Homo sapiens
aaggctagtcatcgcatcttctcg

SEQ ID NO: 5292 - DNA, 23 bp, Homo sapiens
aagtcaagacgaggttcaggcga

SEQ ID NO: 5293 - DNA, 25 bp, Homo sapiens
cgtagaccttgttcggtagtgggaa

SEQ ID NO: 5294 - DNA, 23 bp, Homo sapiens
ggtcgccaaggaaggacgagtac

SEQ ID NO: 5295 - DNA, 24 bp, Homo sapiens
ccagtgtgaccgctattgagaagt

SEQ ID NO: 5296 - DNA, 24 bp, Homo sapiens
agatcggacctcaactctaggcgg

SEQ ID NO: 5297 - DNA, 25 bp, Homo sapiens
cgtagaccttgttcggtagtgggaa

SEQ ID NO: 5298 - DNA, 23 bp, Homo sapiens
ggtcgccaaggaaggacgagtac

SEQ ID NO: 5299 - DNA, 24 bp, Homo sapiens
caaggaaggacgagtactgtggcc

SEQ ID NO: 5300 - DNA, 24 bp, Homo sapiens
tactgattcagggacttctttcgt

SEQ ID NO: 5301 - DNA, 24 bp, Homo sapiens
actgattcagggacttctttcgta

SEQ ID NO: 5302 - DNA, 24 bp, Homo sapiens
gtactgattcagggacttctttcg

SEQ ID NO: 5303 - DNA, 25 bp, Homo sapiens
aatcaggtaagaaggtcactatggc

SEQ ID NO: 5304 - DNA, 25 bp, Homo sapiens
taaaggtacgaacgaaagagttacg

SEQ ID NO: 5305 - DNA, 25 bp, Homo sapiens
acccaagaaaggaggaaccatgaca

SEQ ID NO: 5306 - DNA, 25 bp, Homo sapiens
aagagaacaaggaccgactacctaa

SEQ ID NO: 5307 - DNA, 25 bp, Homo sapiens
caggtacattctccgtttcgtggtt

SEQ ID NO: 5308 - DNA, 25 bp, Homo sapiens
ttaatcgacccagaagtacggaacg

SEQ ID NO: 5309 - DNA, 24 bp, Homo sapiens
cgagtagtgtgtgactttgtgtta

SEQ ID NO: 5310 - DNA, 24 bp, Homo sapiens
gagtagtgtgtgactttgtgttat

SEQ ID NO: 5311 - DNA, 24 bp, Homo sapiens
acgagtagtgtgtgactttgtgtt

SEQ ID NO: 5312 - DNA, 24 bp, Homo sapiens
acctactcctctgacgtgacctca

SEQ ID NO: 5313 - DNA, 24 bp, Homo sapiens
tggcgtggatctaggggttaaaaa

SEQ ID NO: 5314 - DNA, 24 bp, Homo sapiens
ggcgtggatctaggggttaaaaaa

SEQ ID NO: 5315 - DNA, 24 bp, Homo sapiens
gtggcgtggatctaggggttaaaa

SEQ ID NO: 5316 - DNA, 24 bp, Homo sapiens
gggaaggtcatatttcacagtctg

SEQ ID NO: 5317 - DNA, 24 bp, Homo sapiens
ccatcatcacataccttagagcgt

SEQ ID NO: 5318 - DNA, 23 bp, Homo sapiens
taccgaggaggtccagtcccacc

SEQ ID NO: 5319 - DNA, 24 bp, Homo sapiens
gtttgcgacttagaagactgagtg

SEQ ID NO: 5320 - DNA, 24 bp, Homo sapiens
tttgcgacttagaagactgagtga

SEQ ID NO: 5321 - DNA, 24 bp, Homo sapiens
tgtttgcgacttagaagactgagt

SEQ ID NO: 5322 - DNA, 24 bp, Homo sapiens
accacgtagacagaacctaactaa

SEQ ID NO: 5323 - DNA, 24 bp, Homo sapiens
ccacgtagacagaacctaactaaa

SEQ ID NO: 5324 - DNA, 24 bp, Homo sapiens
taccacgtagacagaacctaacta

SEQ ID NO: 5325 - DNA, 24 bp, Homo sapiens
gtcctatggtactgacattaaggt

SEQ ID NO: 5326 - DNA, 24 bp, Homo sapiens
ctctttgtaccagtggaaggacga

SEQ ID NO: 5327 - DNA, 24 bp, Homo sapiens
acaagtccgatgtactccagtagt

SEQ ID NO: 5328 - DNA, 24 bp, Homo sapiens
agacttgactccaggaagtggtgc

SEQ ID NO: 5329 - DNA, 24 bp, Homo sapiens
gacttgactccaggaagtggtgcg

SEQ ID NO: 5330 - DNA, 24 bp, Homo sapiens
aagacttgactccaggaagtggtg

SEQ ID NO: 5331 - DNA, 23 bp, Homo sapiens
acgacctgtgagacccgtcggag

SEQ ID NO: 5332 - DNA, 24 bp, Homo sapiens
acggacgacggacgactctatgat

SEQ ID NO: 5333 - DNA, 25 bp, Homo sapiens
gtcctctccttctccttctaccacg

SEQ ID NO: 5334 - DNA, 25 bp, Homo sapiens
ccacatcttcatccaggacgacgaa

SEQ ID NO: 5335 - DNA, 24 bp, Homo sapiens
ggttacactctggttgtaggaaca

SEQ ID NO: 5336 - DNA, 24 bp, Homo sapiens
gacttaactccctcctcaccatca

SEQ ID NO: 5337 - DNA, 24 bp, Homo sapiens
cgatgttgtcgtctttgccataca

SEQ ID NO: 5338 - DNA, 25 bp, Homo sapiens
aggagttcgcaacactacttacaca

SEQ ID NO: 5339 - DNA, 25 bp, Homo sapiens
acttgtcctcttccactgtgtcctc

SEQ ID NO: 5340 - DNA, 25 bp, Homo sapiens
ctcagccacttcacatctatgacca

SEQ ID NO: 5341 - DNA, 25 bp, Homo sapiens
ctcagccacttcacatctatgacca

SEQ ID NO: 5342 - DNA, 24 bp, Homo sapiens
tagactcatccaagaagccgcagc

SEQ ID NO: 5343 - DNA, 24 bp, Homo sapiens
gcaccgtgattcgtctcttctccg

SEQ ID NO: 5344 - DNA, 25 bp, Homo sapiens
ttgaaccgtaaccgatagaagtgtg

SEQ ID NO: 5345 - DNA, 25 bp, Homo sapiens
acttgtcctcttccactgtgtcctc

SEQ ID NO: 5346 - DNA, 24 bp, Homo sapiens
ccttcaggtatgggtttcggcgaa

SEQ ID NO: 5347 - DNA, 24 bp, Homo sapiens
cttcaggtatgggtttcggcgaaa

SEQ ID NO: 5348 - DNA, 24 bp, Homo sapiens
cccttcaggtatgggtttcggcga

SEQ ID NO: 5349 - DNA, 24 bp, Homo sapiens
gtgtactggtttgactcttttgtc

SEQ ID NO: 5350 - DNA, 24 bp, Homo sapiens
tgtactggtttgactcttttgtcc

SEQ ID NO: 5351 - DNA, 24 bp, Homo sapiens
ggtgtactggtttgactcttttgt

SEQ ID NO: 5352 - DNA, 24 bp, Homo sapiens
aactcctccgagtactaccagtga

SEQ ID NO: 5353 - DNA, 24 bp, Homo sapiens
actcctccgagtactaccagtgat

SEQ ID NO: 5354 - DNA, 24 bp, Homo sapiens
caactcctccgagtactaccagtg

SEQ ID NO: 5355 - DNA, 24 bp, Homo sapiens
cagtgatgcgagaggcaagtgagg

SEQ ID NO: 5356 - DNA, 25 bp, Homo sapiens
cgaggagaccccagtagagtgagaa

SEQ ID NO: 5357 - DNA, 25 bp, Homo sapiens
ccacaatttaaggaggaggagagcg

SEQ ID NO: 5358 - DNA, 24 bp, Homo sapiens
caagaactgactgacacactcgtg

SEQ ID NO: 5359 - DNA, 24 bp, Homo sapiens
aagaactgactgacacactcgtgt

SEQ ID NO: 5360 - DNA, 24 bp, Homo sapiens
acaagaactgactgacacactcgt

SEQ ID NO: 5361 - DNA, 24 bp, Homo sapiens
cttctactccaactacccgacgtg

SEQ ID NO: 5362 - DNA, 24 bp, Homo sapiens
ttctactccaactacccgacgtgg

SEQ ID NO: 5363 - DNA, 24 bp, Homo sapiens
acttctactccaactacccgacgt

SEQ ID NO: 5364 - DNA, 23 bp, Homo sapiens
cgaactgaccaaccgacgactct

SEQ ID NO: 5365 - DNA, 23 bp, Homo sapiens
actggtgaccgaacgtgtggtac

SEQ ID NO: 5366 - DNA, 23 bp, Homo sapiens
gcaaacggttcaatggacaggtc

SEQ ID NO: 5367 - DNA, 25 bp, Homo sapiens
tcgtcattctaggacattgcaggtt

SEQ ID NO: 5368 - DNA, 25 bp, Homo sapiens
gttgaacgactaaagtttccgacga

SEQ ID NO: 5369 - DNA, 25 bp, Homo sapiens
aacggttggtttaagtcgatattca

SEQ ID NO: 5370 - DNA, 24 bp, Homo sapiens
cggaacaggcggaaacggtataga

SEQ ID NO: 5371 - DNA, 24 bp, Homo sapiens
ccgctatgagtctcgtcttgtcct

SEQ ID NO: 5372 - DNA, 24 bp, Homo sapiens
agtgttgtagtagttacctgtccg

SEQ ID NO: 5373 - DNA, 24 bp, Homo sapiens
aaagaacacgaaccaccaagaccg

SEQ ID NO: 5374 - DNA, 24 bp, Homo sapiens
actcttgaactgacttcgtagacc

SEQ ID NO: 5375 - DNA, 24 bp, Homo sapiens
ccagaaggtacagagactcgtgaa

SEQ ID NO: 5376 - DNA, 24 bp, Homo sapiens
actcttgaactgacttcgtagacc

SEQ ID NO: 5377 - DNA, 24 bp, Homo sapiens
ccagaaggtacagagactcgtgaa

SEQ ID NO: 5378 - DNA, 24 bp, Homo sapiens
cggaacaggcggaaacggtataga

SEQ ID NO: 5379 - DNA, 24 bp, Homo sapiens
actcttgaactgacttcgtagacc

SEQ ID NO: 5380 - DNA, 24 bp, Homo sapiens
cggaacaggcggaaacggtataga

SEQ ID NO: 5381 - DNA, 24 bp, Homo sapiens
ccgctatgagtctcgtcttgtcct

SEQ ID NO: 5382 - DNA, 24 bp, Homo sapiens
gccatgacaccttcctcacctaaa

SEQ ID NO: 5383 - DNA, 24 bp, Homo sapiens
tcgtggaacagaggtccgtcttgt

SEQ ID NO: 5384 - DNA, 24 bp, Homo sapiens
gtctcgggtcgtctaggcacaggt

SEQ ID NO: 5385 - DNA, 24 bp, Homo sapiens
ggtagtcagtaagatcgttcaaca

SEQ ID NO: 5386 - DNA, 24 bp, Homo sapiens
gtagtcagtaagatcgttcaacac

SEQ ID NO: 5387 - DNA, 24 bp, Homo sapiens
aggtagtcagtaagatcgttcaac

SEQ ID NO: 5388 - DNA, 25 bp, Homo sapiens
acggttcagaactggtcgatatagt

SEQ ID NO: 5389 - DNA, 25 bp, Homo sapiens
cggagtctcttccttcttattgtta

SEQ ID NO: 5390 - DNA, 23 bp, Homo sapiens
ccagtgaaggactcataggtagt

SEQ ID NO: 5391 - DNA, 23 bp, Homo sapiens
gtcacgacgtagaaaacggtttc

SEQ ID NO: 5392 - DNA, 25 bp, Homo sapiens
ggacaagaccaaaatcaagagccta

SEQ ID NO: 5393 - DNA, 23 bp, Homo sapiens
aatccgcagatgatcgtagcacg

SEQ ID NO: 5394 - DNA, 25 bp, Homo sapiens
cttgtcggagtagttcgagaacacc

SEQ ID NO: 5395 - DNA, 25 bp, Homo sapiens
aggtagtcagtaagatcgttcaaca

SEQ ID NO: 5396 - DNA, 25 bp, Homo sapiens
aaacccagttacctgaaggaacaaa

SEQ ID NO: 5397 - DNA, 23 bp, Homo sapiens
taccaccgccgtagacttacagg

SEQ ID NO: 5398 - DNA, 25 bp, Homo sapiens
cgtcaagtatccttcgccgttctta

SEQ ID NO: 5399 - DNA, 25 bp, Homo sapiens
cgtaagagacattccagaggtgaca

SEQ ID NO: 5400 - DNA, 25 bp, Homo sapiens
ggtaaggtcttccagtctccgttca

SEQ ID NO: 5401 - DNA, 25 bp, Homo sapiens
cgccattcacaacttacggacttcg

SEQ ID NO: 5402 - DNA, 25 bp, Homo sapiens
ggagtagaacgagacttaccacttc

SEQ ID NO: 5403 - DNA, 25 bp, Homo sapiens
gaggaagaaggcgtgaaggtagact

SEQ ID NO: 5404 - DNA, 23 bp, Homo sapiens
aacgacagatggagcagccacga

SEQ ID NO: 5405 - DNA, 24 bp, Homo sapiens
ccgaggtcgttgaggtacttgaac

SEQ ID NO: 5406 - DNA, 24 bp, Homo sapiens
aagctggcagtatgaagaagttcc

SEQ ID NO: 5407 - DNA, 24 bp, Homo sapiens
agctggcagtatgaagaagttcca

SEQ ID NO: 5408 - DNA, 24 bp, Homo sapiens
caagctggcagtatgaagaagttc

SEQ ID NO: 5409 - DNA, 24 bp, Homo sapiens
gaacctcgagtggtgtcacgacta

SEQ ID NO: 5410 - DNA, 24 bp, Homo sapiens
aacctcgagtggtgtcacgactag

SEQ ID NO: 5411 - DNA, 24 bp, Homo sapiens
ggaacctcgagtggtgtcacgact

SEQ ID NO: 5412 - DNA, 24 bp, Homo sapiens
tccactatatctgcgacgggctgc

SEQ ID NO: 5413 - DNA, 24 bp, Homo sapiens
aaagaaaccttacccaaaccaagc

SEQ ID NO: 5414 - DNA, 24 bp, Homo sapiens
gtgaacaacagacgcccgagtttc

SEQ ID NO: 5415 - DNA, 24 bp, Homo sapiens
tgcaggccgtgaagaccttttcag

SEQ ID NO: 5416 - DNA, 24 bp, Homo sapiens
gatcgtcactctcggccttcaagc

SEQ ID NO: 5417 - DNA, 24 bp, Homo sapiens
gacgagcgagaggttgttgtggta

SEQ ID NO: 5418 - DNA, 24 bp, Homo sapiens
gccgtgaagaccttttcagaccag

SEQ ID NO: 5419 - DNA, 24 bp, Homo sapiens
gagtcagggtagtcacagaagact

SEQ ID NO: 5420 - DNA, 24 bp, Homo sapiens
agtcagggtagtcacagaagacta

SEQ ID NO: 5421 - DNA, 24 bp, Homo sapiens
ggagtcagggtagtcacagaagac

SEQ ID NO: 5422 - DNA, 24 bp, Homo sapiens
gtcaaacagacagacgaccaaccg

SEQ ID NO: 5423 - DNA, 24 bp, Homo sapiens
gattcgtaagtagtatcgcaaggt

SEQ ID NO: 5424 - DNA, 24 bp, Homo sapiens
cgtcacaacatcgtgtcgagtaca

SEQ ID NO: 5425 - DNA, 24 bp, Homo sapiens
cagaagactattacttgccgccgt

SEQ ID NO: 5426 - DNA, 24 bp, Homo sapiens
tcaagacggacacccagaaggagt

SEQ ID NO: 5427 - DNA, 24 bp, Homo sapiens
tttcggaggagacaagctgggact

SEQ ID NO: 5428 - DNA, 24 bp, Homo sapiens
gattcgtaagtagtatcgcaaggt

SEQ ID NO: 5429 - DNA, 24 bp, Homo sapiens
cagaagactattacttgccgccgt

SEQ ID NO: 5430 - DNA, 24 bp, Homo sapiens
tcaagacggacacccagaaggagt

SEQ ID NO: 5431 - DNA, 24 bp, Homo sapiens
acttctggagttaccgtgatagtt

SEQ ID NO: 5432 - DNA, 24 bp, Homo sapiens
gtgattaacggaggaagaaggcgg

SEQ ID NO: 5433 - DNA, 24 bp, Homo sapiens
cgacacggtcccacacttatagaa

SEQ ID NO: 5434 - DNA, 24 bp, Homo sapiens
acttctggagttaccgtgatagtt

SEQ ID NO: 5435 - DNA, 24 bp, Homo sapiens
gtgattaacggaggaagaaggcgg

SEQ ID NO: 5436 - DNA, 24 bp, Homo sapiens
ctctgtatgatagactgctaccgt

SEQ ID NO: 5437 - DNA, 24 bp, Homo sapiens
acgtcgaagagaatagttcctgtt

SEQ ID NO: 5438 - DNA, 24 bp, Homo sapiens
gtgattaacggaggaagaaggcgg

SEQ ID NO: 5439 - DNA, 24 bp, Homo sapiens
tagacgaagagtaagtcaccgacg

SEQ ID NO: 5440 - DNA, 24 bp, Homo sapiens
tgaacggtatgtataggtaggact

SEQ ID NO: 5441 - DNA, 24 bp, Homo sapiens
tcagggtggaagtcttggctttgt

SEQ ID NO: 5442 - DNA, 24 bp, Homo sapiens
ctgcttttgccggatggttttctt

SEQ ID NO: 5443 - DNA, 24 bp, Homo sapiens
tgcttttgccggatggttttcttt

SEQ ID NO: 5444 - DNA, 24 bp, Homo sapiens
actgcttttgccggatggttttct

SEQ ID NO: 5445 - DNA, 24 bp, Homo sapiens
ggaggtaaagagtgttcgtgtggg

SEQ ID NO: 5446 - DNA, 24 bp, Homo sapiens
aagtacctccaccaaccgaagtcg

SEQ ID NO: 5447 - DNA, 24 bp, Homo sapiens
actttgtgaactttgacagggtga

SEQ ID NO: 5448 - DNA, 24 bp, Homo sapiens
gacgaaacaagtaggtcactccga

SEQ ID NO: 5449 - DNA, 24 bp, Homo sapiens
cttagcggacagtttgagggcgac

SEQ ID NO: 5450 - DNA, 24 bp, Homo sapiens
aaacctcagacctttcgtggacct

SEQ ID NO: 5451 - DNA, 24 bp, Homo sapiens
ccgaccaggaagtgataccgactc

SEQ ID NO: 5452 - DNA, 24 bp, Homo sapiens
aggaagtgataccgactctcgtcc

SEQ ID NO: 5453 - DNA, 24 bp, Homo sapiens
gaaccctctcctcccgacaccttc

SEQ ID NO: 5454 - DNA, 24 bp, Homo sapiens
aaacctcagacctttcgtggacct

SEQ ID NO: 5455 - DNA, 24 bp, Homo sapiens
ccgaccaggaagtgataccgactc

SEQ ID NO: 5456 - DNA, 24 bp, Homo sapiens
cagtaggttgtagactttgtctta

SEQ ID NO: 5457 - DNA, 24 bp, Homo sapiens
agtaggttgtagactttgtcttaa

SEQ ID NO: 5458 - DNA, 24 bp, Homo sapiens
acagtaggttgtagactttgtctt

SEQ ID NO: 5459 - DNA, 24 bp, Homo sapiens
ttaatcgagacccaaagaccgctc

SEQ ID NO: 5460 - DNA, 24 bp, Homo sapiens
aggaaagaattgccaaacggaaca

SEQ ID NO: 5461 - DNA, 24 bp, Homo sapiens
agttatcgtaggaggtattataga

SEQ ID NO: 5462 - DNA, 24 bp, Homo sapiens
cgacctgtgacccttgttataccg

SEQ ID NO: 5463 - DNA, 24 bp, Homo sapiens
cgccgcgcccgggacgcccctgtt

SEQ ID NO: 5464 - DNA, 24 bp, Homo sapiens
gccgcgcccgggacgcccctgttc

SEQ ID NO: 5465 - DNA, 24 bp, Homo sapiens
ccgccgcgcccgggacgcccctgt

SEQ ID NO: 5466 - DNA, 24 bp, Homo sapiens
aggtgaccgcgagatttacgtcga

SEQ ID NO: 5467 - DNA, 24 bp, Homo sapiens
ggtgaccgcgagatttacgtcgac

SEQ ID NO: 5468 - DNA, 24 bp, Homo sapiens
aaggtgaccgcgagatttacgtcg

SEQ ID NO: 5469 - DNA, 24 bp, Homo sapiens
gtggtcgtgttgaatgacgtgtca

SEQ ID NO: 5470 - DNA, 24 bp, Homo sapiens
tctgtctcaaacgcctacgcttca

SEQ ID NO: 5471 - DNA, 24 bp, Homo sapiens
cgcagtcagacagaggtgagaggg

SEQ ID NO: 5472 - DNA, 24 bp, Homo sapiens
gtatgagggcgtggaaatctggga

SEQ ID NO: 5473 - DNA, 25 bp, Homo sapiens
tcgtcaaacttagctactggggtcc

SEQ ID NO: 5474 - DNA, 24 bp, Homo sapiens
ccgagggacggacctgtagttcgt

SEQ ID NO: 5475 - DNA, 24 bp, Homo sapiens
cccgtaggaactcccgaacagatg

SEQ ID NO: 5476 - DNA, 24 bp, Homo sapiens
cgtggtgaccgtgaaacaatctct

SEQ ID NO: 5477 - DNA, 24 bp, Homo sapiens
gtagaccacaaggtaaaagtagta

SEQ ID NO: 5478 - DNA, 24 bp, Homo sapiens
tagaccacaaggtaaaagtagtac

SEQ ID NO: 5479 - DNA, 24 bp, Homo sapiens
cgtagaccacaaggtaaaagtagt

SEQ ID NO: 5480 - DNA, 25 bp, Homo sapiens
ctttgtcgtcccctttacccaagaa

SEQ ID NO: 5481 - DNA, 25 bp, Homo sapiens
gagaaacccaacgaaactagaggtg

SEQ ID NO: 5482 - DNA, 23 bp, Homo sapiens
agaacagcctaaagaagaagagg

SEQ ID NO: 5483 - DNA, 24 bp, Homo sapiens
caacactaatattagaagtggtgg

SEQ ID NO: 5484 - DNA, 24 bp, Homo sapiens
caaggtgatacgaacgtcaggtga

SEQ ID NO: 5485 - DNA, 24 bp, Homo sapiens
aagggttgaattggtccacacaat

SEQ ID NO: 5486 - DNA, 24 bp, Homo sapiens
gtgaagtagttgttgttttcgtca

SEQ ID NO: 5487 - DNA, 24 bp, Homo sapiens
gcaacttagaaccttccactcgta

SEQ ID NO: 5488 - DNA, 24 bp, Homo sapiens
cgttcgtcctctcgtccaaggttc

SEQ ID NO: 5489 - DNA, 24 bp, Homo sapiens
ccagaggtctcgtcggaagtcagt

SEQ ID NO: 5490 - DNA, 24 bp, Homo sapiens
agagacagaagagtgaccgctcaa

SEQ ID NO: 5491 - DNA, 25 bp, Homo sapiens
cctggaagaggtaaggtaaccaaga

SEQ ID NO: 5492 - DNA, 25 bp, Homo sapiens
gagatccacttagtagaagcctcgg

SEQ ID NO: 5493 - DNA, 25 bp, Homo sapiens
aaacaaaggaagaaacccgtcgtcg

SEQ ID NO: 5494 - DNA, 24 bp, Homo sapiens
tcactaaccgtcttatcctctacg

SEQ ID NO: 5495 - DNA, 25 bp, Homo sapiens
aaccacgagaagacccatacagact

SEQ ID NO: 5496 - DNA, 24 bp, Homo sapiens
tactaccgctgacttccctctgct

SEQ ID NO: 5497 - DNA, 24 bp, Homo sapiens
acagcctcttgtagagtagcaccg

SEQ ID NO: 5498 - DNA, 24 bp, Homo sapiens
cgtgttgggcaggcgctagagggc

SEQ ID NO: 5499 - DNA, 24 bp, Homo sapiens
agacataaacatgaacctgtggta

SEQ ID NO: 5500 - DNA, 24 bp, Homo sapiens
gacataaacatgaacctgtggtaa

SEQ ID NO: 5501 - DNA, 24 bp, Homo sapiens
gagacataaacatgaacctgtggt

SEQ ID NO: 5502 - DNA, 24 bp, Homo sapiens
tcctacggctttatcctgctctct

SEQ ID NO: 5503 - DNA, 24 bp, Homo sapiens
acccattcctgtcggacccattgg

SEQ ID NO: 5504 - DNA, 24 bp, Homo sapiens
tgaacaacaccgtcctatacctgg

SEQ ID NO: 5505 - DNA, 24 bp, Homo sapiens
gagcctaccacaggagcgactaac

SEQ ID NO: 5506 - DNA, 24 bp, Homo sapiens
cccgtgctaggtaaaggaggaagt

SEQ ID NO: 5507 - DNA, 24 bp, Homo sapiens
agaagaagacaagcaaagttccgt

SEQ ID NO: 5508 - DNA, 24 bp, Homo sapiens
cgagaacccgatggaccttataga

SEQ ID NO: 5509 - DNA, 24 bp, Homo sapiens
gacatcaggacatcattaccgagc

SEQ ID NO: 5510 - DNA, 24 bp, Homo sapiens
aagaaagggtaacagaagtcagca

SEQ ID NO: 5511 - DNA, 24 bp, Homo sapiens
acctagaaacggaactgtaagagc

SEQ ID NO: 5512 - DNA, 24 bp, Homo sapiens
ggagacgactagtcttccttacgg

SEQ ID NO: 5513 - DNA, 25 bp, Homo sapiens
tcttatgtggtgggagtatgtgcct

SEQ ID NO: 5514 - DNA, 25 bp, Homo sapiens
acctccgaacttccctataagacca

SEQ ID NO: 5515 - DNA, 25 bp, Homo sapiens
gacagtacaagacgagacaaccagt

SEQ ID NO: 5516 - DNA, 24 bp, Homo sapiens
ccttgactcttcgtggtagaactc

SEQ ID NO: 5517 - DNA, 25 bp, Homo sapiens
gtgtctattaagatcgagaacggct

SEQ ID NO: 5518 - DNA, 25 bp, Homo sapiens
acgacaccactcataaaaaagatca

SEQ ID NO: 5519 - DNA, 24 bp, Homo sapiens
gactacgactttgccggacgaatg

SEQ ID NO: 5520 - DNA, 24 bp, Homo sapiens
actacgactttgccggacgaatgg

SEQ ID NO: 5521 - DNA, 24 bp, Homo sapiens
ggactacgactttgccggacgaat

SEQ ID NO: 5522 - DNA, 24 bp, Homo sapiens
accggagtaggtggaaggactcga

SEQ ID NO: 5523 - DNA, 24 bp, Homo sapiens
acctagtgtcgtagaagaccttat

SEQ ID NO: 5524 - DNA, 24 bp, Homo sapiens
tataaaataacgacggtaggggta

SEQ ID NO: 5525 - DNA, 24 bp, Homo sapiens
ccacgtagtgacggttgactgaga

SEQ ID NO: 5526 - DNA, 24 bp, Homo sapiens
atgtgctccgtaaaagtggattcg

SEQ ID NO: 5527 - DNA, 24 bp, Homo sapiens
agagaggttgacgtttaacaagac

SEQ ID NO: 5528 - DNA, 24 bp, Homo sapiens
cggttacccattaggatgaaaggt

SEQ ID NO: 5529 - DNA, 24 bp, Homo sapiens
aagctagagaccgtcagactcgac

SEQ ID NO: 5530 - DNA, 24 bp, Homo sapiens
acgacaaggtcgagtgagtaagct

SEQ ID NO: 5531 - DNA, 24 bp, Homo sapiens
atgaatgtcgtcgacttcggttgg

SEQ ID NO: 5532 - DNA, 24 bp, Homo sapiens
tgaatgtcgtcgacttcggttggg

SEQ ID NO: 5533 - DNA, 24 bp, Homo sapiens
aatgaatgtcgtcgacttcggttg

SEQ ID NO: 5534 - DNA, 24 bp, Homo sapiens
cgttaccacaggttcgttattgtt

SEQ ID NO: 5535 - DNA, 25 bp, Homo sapiens
agcaggaacttgtagtaaggttaga

SEQ ID NO: 5536 - DNA, 24 bp, Homo sapiens
tcgaaggaatcgtgagtgtgtaaa

SEQ ID NO: 5537 - DNA, 25 bp, Homo sapiens
agtatctgacctagagccagtcgtc

SEQ ID NO: 5538 - DNA, 25 bp, Homo sapiens
caaaccaaaagtgaaaggagtagtc

SEQ ID NO: 5539 - DNA, 24 bp, Homo sapiens
acacaggcttaagaggtgttctta

SEQ ID NO: 5540 - DNA, 24 bp, Homo sapiens
cacaggcttaagaggtgttcttat

SEQ ID NO: 5541 - DNA, 24 bp, Homo sapiens
tacacaggcttaagaggtgttctt

SEQ ID NO: 5542 - DNA, 24 bp, Homo sapiens
aggctacagatgtttcccgactca

SEQ ID NO: 5543 - DNA, 24 bp, Homo sapiens
agcatccgaaagagaggacacaca

SEQ ID NO: 5544 - DNA, 24 bp, Homo sapiens
tgtcactccatactgtaggctctc

SEQ ID NO: 5545 - DNA, 24 bp, Homo sapiens
cagagtactcccgacttaagtcca

SEQ ID NO: 5546 - DNA, 24 bp, Homo sapiens
agagtactcccgacttaagtccat

SEQ ID NO: 5547 - DNA, 24 bp, Homo sapiens
acagagtactcccgacttaagtcc

SEQ ID NO: 5548 - DNA, 24 bp, Homo sapiens
ccgacaacttacgactaaacacca

SEQ ID NO: 5549 - DNA, 24 bp, Homo sapiens
cgacaacttacgactaaacaccat

SEQ ID NO: 5550 - DNA, 24 bp, Homo sapiens
accgacaacttacgactaaacacc

SEQ ID NO: 5551 - DNA, 24 bp, Homo sapiens
agcactctcatctgaacgccgtct

SEQ ID NO: 5552 - DNA, 24 bp, Homo sapiens
gccaaagagaggacacacccagga

SEQ ID NO: 5553 - DNA, 24 bp, Homo sapiens
tgtcactctatactgttggctctc

SEQ ID NO: 5554 - DNA, 24 bp, Homo sapiens
acctatcactccatactgttgacc

SEQ ID NO: 5555 - DNA, 24 bp, Homo sapiens
aggctacagatgtttcccgactca

SEQ ID NO: 5556 - DNA, 24 bp, Homo sapiens
agcatccgaaagagaggacacaca

SEQ ID NO: 5557 - DNA, 24 bp, Homo sapiens
tcccaaagagaggacttactcaag

SEQ ID NO: 5558 - DNA, 24 bp, Homo sapiens
cccaaagagaggacttactcaaga

SEQ ID NO: 5559 - DNA, 24 bp, Homo sapiens
atcccaaagagaggacttactcaa

SEQ ID NO: 5560 - DNA, 24 bp, Homo sapiens
ccttgcgaagacataacggaacgg

SEQ ID NO: 5561 - DNA, 24 bp, Homo sapiens
agaggttacactactgaacgaaca

SEQ ID NO: 5562 - DNA, 24 bp, Homo sapiens
ggtgactttgaccttcggtactta

SEQ ID NO: 5563 - DNA, 24 bp, Homo sapiens
ccttgcgaagacataacggaacgg

SEQ ID NO: 5564 - DNA, 24 bp, Homo sapiens
agaggttacactactgaacgaaca

SEQ ID NO: 5565 - DNA, 24 bp, Homo sapiens
cgtcaagtccgtctacgcttactt

SEQ ID NO: 5566 - DNA, 24 bp, Homo sapiens
cgtcggacttctagtggagaccaa

SEQ ID NO: 5567 - DNA, 24 bp, Homo sapiens
agaaggaggacaaaggtaccgaga

SEQ ID NO: 5568 - DNA, 24 bp, Homo sapiens
agtaggtttccaaacggtgtaaga

SEQ ID NO: 5569 - DNA, 24 bp, Homo sapiens
gcaagaagtgtaaaggtcccaaag

SEQ ID NO: 5570 - DNA, 24 bp, Homo sapiens
gacgagtaagtccaaacacctggt

SEQ ID NO: 5571 - DNA, 24 bp, Homo sapiens
ggagagtacctggaactctactac

SEQ ID NO: 5572 - DNA, 24 bp, Homo sapiens
gagagtacctggaactctactact

SEQ ID NO: 5573 - DNA, 24 bp, Homo sapiens
tggagagtacctggaactctacta

SEQ ID NO: 5574 - DNA, 24 bp, Homo sapiens
acaagttttgtaggtcactctggt

SEQ ID NO: 5575 - DNA, 24 bp, Homo sapiens
caagttttgtaggtcactctggtc

SEQ ID NO: 5576 - DNA, 24 bp, Homo sapiens
gacaagttttgtaggtcactctgg

SEQ ID NO: 5577 - DNA, 24 bp, Homo sapiens
tatgtccgaagagactcgacccag

SEQ ID NO: 5578 - DNA, 25 bp, Homo sapiens
tgtaggtcactctggtccaaaggta

SEQ ID NO: 5579 - DNA, 25 bp, Homo sapiens
tgtcaaccgaggagtaggaatagag

SEQ ID NO: 5580 - DNA, 24 bp, Homo sapiens
ggtctaaagtcaagggagaaacgg

SEQ ID NO: 5581 - DNA, 24 bp, Homo sapiens
ccttggacccttacctctggactc

SEQ ID NO: 5582 - DNA, 24 bp, Homo sapiens
ttctcttgaccatcgggaaggacg

SEQ ID NO: 5583 - DNA, 24 bp, Homo sapiens
tgagtctgaagcgagttgaagact

SEQ ID NO: 5584 - DNA, 24 bp, Homo sapiens
gagtctgaagcgagttgaagactt

SEQ ID NO: 5585 - DNA, 24 bp, Homo sapiens
atgagtctgaagcgagttgaagac

SEQ ID NO: 5586 - DNA, 24 bp, Homo sapiens
ggacgagtcagtaaagtttgaagt

SEQ ID NO: 5587 - DNA, 24 bp, Homo sapiens
gagagcctcgtcgaagtccaacaa

SEQ ID NO: 5588 - DNA, 24 bp, Homo sapiens
atgcctgagttccttgcgagagta

SEQ ID NO: 5589 - DNA, 25 bp, Homo sapiens
ttctgttctccgtactttgacccac

SEQ ID NO: 5590 - DNA, 25 bp, Homo sapiens
acgaacatgaacaacttgaaggtag

SEQ ID NO: 5591 - DNA, 25 bp, Homo sapiens
tccgaagtcagctagtaatagaggt

SEQ ID NO: 5592 - DNA, 25 bp, Homo sapiens
tcgcagtaataataacacaaggcaa

SEQ ID NO: 5593 - DNA, 25 bp, Homo sapiens
aagcaatagaagttctacacaacgt

SEQ ID NO: 5594 - DNA, 25 bp, Homo sapiens
ccaaagtgtcggagtattcgggaga

SEQ ID NO: 5595 - DNA, 25 bp, Homo sapiens
cttgaaggtagaaaccagtgtcgca

SEQ ID NO: 5596 - DNA, 24 bp, Homo sapiens
ttgtaatcctcacgataccgaagg

SEQ ID NO: 5597 - DNA, 25 bp, Homo sapiens
ccgagagtgaccaaaaaccacagac

SEQ ID NO: 5598 - DNA, 25 bp, Homo sapiens
acaatagttgaagtcggaagtcagc

SEQ ID NO: 5599 - DNA, 25 bp, Homo sapiens
tgaaacctgacttctcgtcgttgac

SEQ ID NO: 5600 - DNA, 24 bp, Homo sapiens
gtcccgaaagaactccgctaacca

SEQ ID NO: 5601 - DNA, 25 bp, Homo sapiens
acaatagttgaagtcggaagtcagc

SEQ ID NO: 5602 - DNA, 24 bp, Homo sapiens
gtcccgaaagaactccgctaacca

SEQ ID NO: 5603 - DNA, 24 bp, Homo sapiens
tgtggtgtaggaggagtgacggaa

SEQ ID NO: 5604 - DNA, 25 bp, Homo sapiens
tggttgttggtgccactcatcttgg

SEQ ID NO: 5605 - DNA, 25 bp, Homo sapiens
gctaaccacctgagacctattaacg

SEQ ID NO: 5606 - DNA, 24 bp, Homo sapiens
ttcgttactacctaaggacactgg

SEQ ID NO: 5607 - DNA, 24 bp, Homo sapiens
atgcaatgagtggtagaccgaact

SEQ ID NO: 5608 - DNA, 24 bp, Homo sapiens
tgcaatgagtggtagaccgaactt

SEQ ID NO: 5609 - DNA, 24 bp, Homo sapiens
catgcaatgagtggtagaccgaac

SEQ ID NO: 5610 - DNA, 24 bp, Homo sapiens
aaccgtcaacgaagtcaccttagt

SEQ ID NO: 5611 - DNA, 25 bp, Homo sapiens
aacttcaaacccatgaccacagcca

SEQ ID NO: 5612 - DNA, 25 bp, Homo sapiens
agaagttacatttgtggtagaccga

SEQ ID NO: 5613 - DNA, 24 bp, Homo sapiens
tgaagagaaaccaaaccgtcaacg

SEQ ID NO: 5614 - DNA, 25 bp, Homo sapiens
cgtcagaggtcttaggtccgaagta

SEQ ID NO: 5615 - DNA, 25 bp, Homo sapiens
gcccgttagaaccaacaataccttt

SEQ ID NO: 5616 - DNA, 25 bp, Homo sapiens
aaatggtagggtggttggaaaggcg

SEQ ID NO: 5617 - DNA, 24 bp, Homo sapiens
ttatgagacttggtaccggaggtc

SEQ ID NO: 5618 - DNA, 24 bp, Homo sapiens
tatgagacttggtaccggaggtcc

SEQ ID NO: 5619 - DNA, 24 bp, Homo sapiens
gttatgagacttggtaccggaggt

SEQ ID NO: 5620 - DNA, 25 bp, Homo sapiens
ccttcttcccgtaatcgtggtagac

SEQ ID NO: 5621 - DNA, 25 bp, Homo sapiens
tacaagaacgtcaaggagaagaccg

SEQ ID NO: 5622 - DNA, 25 bp, Homo sapiens
acgaacgaataaaggtccaaggtct

SEQ ID NO: 5623 - DNA, 24 bp, Homo sapiens
ttaacgagaaagtataaaggggag

SEQ ID NO: 5624 - DNA, 23 bp, Homo sapiens
gtggtagacgacgatagggagct

SEQ ID NO: 5625 - DNA, 25 bp, Homo sapiens
cggtatcgagacaatcgaccttctt

SEQ ID NO: 5626 - DNA, 24 bp, Homo sapiens
ccatgactaatggaacggaaacca

SEQ ID NO: 5627 - DNA, 24 bp, Homo sapiens
catgactaatggaacggaaaccac

SEQ ID NO: 5628 - DNA, 24 bp, Homo sapiens
accatgactaatggaacggaaacc

SEQ ID NO: 5629 - DNA, 25 bp, Homo sapiens
gagaagcgactccgaaaagggactc

SEQ ID NO: 5630 - DNA, 23 bp, Homo sapiens
taaggacgacccaggagaagcga

SEQ ID NO: 5631 - DNA, 25 bp, Homo sapiens
gctcacttatccttgcggactcacc

SEQ ID NO: 5632 - DNA, 25 bp, Homo sapiens
tgacgacacaggacactttacttgg

SEQ ID NO: 5633 - DNA, 24 bp, Homo sapiens
ttaaagtaactggtgacgggttcg

SEQ ID NO: 5634 - DNA, 24 bp, Homo sapiens
taaagtaactggtgacgggttcgg

SEQ ID NO: 5635 - DNA, 24 bp, Homo sapiens
gttaaagtaactggtgacgggttc

SEQ ID NO: 5636 - DNA, 25 bp, Homo sapiens
tcagatcgtcgtgctagaagaggtt

SEQ ID NO: 5637 - DNA, 25 bp, Homo sapiens
acggagtaattcagactggacgaca

SEQ ID NO: 5638 - DNA, 24 bp, Homo sapiens
acggtatgtaagaccacgagcacg

SEQ ID NO: 5639 - DNA, 23 bp, Homo sapiens
acttataggaacatgaaaacaag

SEQ ID NO: 5640 - DNA, 24 bp, Homo sapiens
tacggtatgtaagaccacgagcac

SEQ ID NO: 5641 - DNA, 23 bp, Homo sapiens
ggaaaagaatcgttgttgtagac

SEQ ID NO: 5642 - DNA, 25 bp, Homo sapiens
tgggtgaacgtaacaacagagtcaa

SEQ ID NO: 5643 - DNA, 25 bp, Homo sapiens
acttagaagtggaaattgaaaacaa

SEQ ID NO: 5644 - DNA, 25 bp, Homo sapiens
aaagaacaaagaaagaggttaccat

SEQ ID NO: 5645 - DNA, 24 bp, Homo sapiens
aacccgtcactagacacctataag

SEQ ID NO: 5646 - DNA, 24 bp, Homo sapiens
acccgtcactagacacctataaga

SEQ ID NO: 5647 - DNA, 24 bp, Homo sapiens
aaacccgtcactagacacctataa

SEQ ID NO: 5648 - DNA, 25 bp, Homo sapiens
cgtcccgatctagcaaagaagagac

SEQ ID NO: 5649 - DNA, 25 bp, Homo sapiens
acgacctactatgacaacattcact

SEQ ID NO: 5650 - DNA, 25 bp, Homo sapiens
actcggttacaaggttgtctgtcac

SEQ ID NO: 5651 - DNA, 25 bp, Homo sapiens
acgacctactatgacaacattcact

SEQ ID NO: 5652 - DNA, 25 bp, Homo sapiens
actcggttacaaggttgtctgtcac

SEQ ID NO: 5653 - DNA, 25 bp, Homo sapiens
acgacgaaccattcaaacaagaagt

SEQ ID NO: 5654 - DNA, 25 bp, Homo sapiens
acagtagaagaagaaggagcaggag

SEQ ID NO: 5655 - DNA, 25 bp, Homo sapiens
tgactgtgtatggaggacctaccgt

SEQ ID NO: 5656 - DNA, 25 bp, Homo sapiens
acttgtgtgtctcccgatgttaccg

SEQ ID NO: 5657 - DNA, 25 bp, Homo sapiens
acttgtgtgtctcccgatgttaccg

SEQ ID NO: 5658 - DNA, 25 bp, Homo sapiens
tcctgttacatagagtcgccttacg

SEQ ID NO: 5659 - DNA, 25 bp, Homo sapiens
agttaacgtatacctgaggcttcga

SEQ ID NO: 5660 - DNA, 23 bp, Homo sapiens
aatggtcgtggtactgtgttgca

SEQ ID NO: 5661 - DNA, 25 bp, Homo sapiens
ccacttagggttagtttcgttgata

SEQ ID NO: 5662 - DNA, 25 bp, Homo sapiens
ggtctgttgtttctctttctcgtgt

SEQ ID NO: 5663 - DNA, 24 bp, Homo sapiens
ttcctaagacttcgagacgagacg

SEQ ID NO: 5664 - DNA, 25 bp, Homo sapiens
aagacacatccagactatccgcatt

SEQ ID NO: 5665 - DNA, 25 bp, Homo sapiens
ccactacgactgataaggagaggtt

SEQ ID NO: 5666 - DNA, 25 bp, Homo sapiens
agaaaaggaggctaaaatttgaagt

SEQ ID NO: 5667 - DNA, 23 bp, Homo sapiens
ggtgtgtcccaactccaagaaca

SEQ ID NO: 5668 - DNA, 25 bp, Homo sapiens
ttctactagttggtcttatgttcga

SEQ ID NO: 5669 - DNA, 25 bp, Homo sapiens
gaggagagcaaggaagaccaggagg

SEQ ID NO: 5670 - DNA, 24 bp, Homo sapiens
ttgggaaggcgagactactgaaag

SEQ ID NO: 5671 - DNA, 25 bp, Homo sapiens
acacaatcgtcagatagcaacaagt

SEQ ID NO: 5672 - DNA, 25 bp, Homo sapiens
ccataattacaagcattcgaccgaa

SEQ ID NO: 5673 - DNA, 23 bp, Homo sapiens
aatggtcgtggtactgtgttgca

SEQ ID NO: 5674 - DNA, 25 bp, Homo sapiens
ggtctgttgtttctctttctcgtgt

SEQ ID NO: 5675 - DNA, 23 bp, Homo sapiens
tgtgtgtctcccgatgttaccgg

SEQ ID NO: 5676 - DNA, 25 bp, Homo sapiens
gagtcgccttacgtcatgtcctacc

SEQ ID NO: 5677 - DNA, 25 bp, Homo sapiens
tagagatggtgatgacgcagagact

SEQ ID NO: 5678 - DNA, 25 bp, Homo sapiens
aggaggagtagttgaagtagtgacg

SEQ ID NO: 5679 - DNA, 25 bp, Homo sapiens
gagaagtagtgggaggagtagaacg

SEQ ID NO: 5680 - DNA, 24 bp, Homo sapiens
accaagtatcagaggtcccgtgga

SEQ ID NO: 5681 - DNA, 24 bp, Homo sapiens
acacgacagagttgacagaccagg

SEQ ID NO: 5682 - DNA, 25 bp, Homo sapiens
ttcaactcgtaagacaccaaggtac

SEQ ID NO: 5683 - DNA, 24 bp, Homo sapiens
ccgggccgtcgtgaagtcccctcc

SEQ ID NO: 5684 - DNA, 24 bp, Homo sapiens
cgggccgtcgtgaagtcccctcct

SEQ ID NO: 5685 - DNA, 24 bp, Homo sapiens
accgggccgtcgtgaagtcccctc

SEQ ID NO: 5686 - DNA, 24 bp, Homo sapiens
gtgggtcgactgaagaaggaaata

SEQ ID NO: 5687 - DNA, 24 bp, Homo sapiens
tgggtcgactgaagaaggaaataa

SEQ ID NO: 5688 - DNA, 24 bp, Homo sapiens
cgtgggtcgactgaagaaggaaat

SEQ ID NO: 5689 - DNA, 25 bp, Homo sapiens
agaagtattgaggagaacaccgctg

SEQ ID NO: 5690 - DNA, 25 bp, Homo sapiens
aaccagaaagacgaataacccgaca

SEQ ID NO: 5691 - DNA, 25 bp, Homo sapiens
cgagaggtgtggtaacttctggtgg

SEQ ID NO: 5692 - DNA, 24 bp, Homo sapiens
ttatacgattgtgactgctatcga

SEQ ID NO: 5693 - DNA, 24 bp, Homo sapiens
tatacgattgtgactgctatcgac

SEQ ID NO: 5694 - DNA, 24 bp, Homo sapiens
tttatacgattgtgactgctatcg

SEQ ID NO: 5695 - DNA, 24 bp, Homo sapiens
agtcgactgtacactgtcacaact

SEQ ID NO: 5696 - DNA, 24 bp, Homo sapiens
gtcgactgtacactgtcacaactg

SEQ ID NO: 5697 - DNA, 24 bp, Homo sapiens
aagtcgactgtacactgtcacaac

SEQ ID NO: 5698 - DNA, 25 bp, Homo sapiens
cagtgtattagaaggaggtgtgaga

SEQ ID NO: 5699 - DNA, 25 bp, Homo sapiens
aaacaacagaaagaaaggtcgtcaa

SEQ ID NO: 5700 - DNA, 23 bp, Homo sapiens
cgtagacggaaggaagcctcagc

SEQ ID NO: 5701 - DNA, 24 bp, Homo sapiens
tgatacttaacggaaccttcacca

SEQ ID NO: 5702 - DNA, 25 bp, Homo sapiens
acactaaaccaaagaccgtcaggac

SEQ ID NO: 5703 - DNA, 25 bp, Homo sapiens
tgcgacacatcatcacgaggtaaca

SEQ ID NO: 5704 - DNA, 25 bp, Homo sapiens
acactaaaccaaagaccgtcaggac

SEQ ID NO: 5705 - DNA, 25 bp, Homo sapiens
ggttctacacgtccttcactgtcgg

SEQ ID NO: 5706 - DNA, 25 bp, Homo sapiens
tgcgacacatcatcacgaggtaaca

SEQ ID NO: 5707 - DNA, 25 bp, Homo sapiens
gagaagaccgaacaagacttcctcg

SEQ ID NO: 5708 - DNA, 25 bp, Homo sapiens
ttgttccaggttacgaaagtagtgt

SEQ ID NO: 5709 - DNA, 25 bp, Homo sapiens
tttctaagacctggtgacctcggga

SEQ ID NO: 5710 - DNA, 25 bp, Homo sapiens
gagaagaccgaacaagacttcctcg

SEQ ID NO: 5711 - DNA, 25 bp, Homo sapiens
gtgtagaaggtcttcacttagccca

SEQ ID NO: 5712 - DNA, 25 bp, Homo sapiens
gtcctagactttgttccaggttacg

SEQ ID NO: 5713 - DNA, 25 bp, Homo sapiens
agagaatccacttgacagaccgtag

SEQ ID NO: 5714 - DNA, 25 bp, Homo sapiens
cggtcattattctcgaggaggtaga

SEQ ID NO: 5715 - DNA, 24 bp, Homo sapiens
taacataccaacgaggctgacgaa

SEQ ID NO: 5716 - DNA, 25 bp, Homo sapiens
ggaccactacctctttcttatcacc

SEQ ID NO: 5717 - DNA, 25 bp, Homo sapiens
tcggtcttaaaggagtaggtcagag

SEQ ID NO: 5718 - DNA, 25 bp, Homo sapiens
aaagactcagttcactagcttggga

SEQ ID NO: 5719 - DNA, 24 bp, Homo sapiens
gtggtcgtagtggacgttccctct

SEQ ID NO: 5720 - DNA, 24 bp, Homo sapiens
tggtcgtagtggacgttccctctc

SEQ ID NO: 5721 - DNA, 24 bp, Homo sapiens
agtggtcgtagtggacgttccctc

SEQ ID NO: 5722 - DNA, 24 bp, Homo sapiens
accctcttcagacaaacaacttca

SEQ ID NO: 5723 - DNA, 25 bp, Homo sapiens
actccagatagactacaacactact

SEQ ID NO: 5724 - DNA, 25 bp, Homo sapiens
acctctcgacaagtgtctcagcatg

SEQ ID NO: 5725 - DNA, 24 bp, Homo sapiens
ccagaacccatgtccgaaaccacc

SEQ ID NO: 5726 - DNA, 25 bp, Homo sapiens
accaaagtagtatgtgagcgaccaa

SEQ ID NO: 5727 - DNA, 23 bp, Homo sapiens
tgaccgatatagggaggaggacc

SEQ ID NO: 5728 - DNA, 24 bp, Homo sapiens
ttaagtgtaactctgtcgcacgag

SEQ ID NO: 5729 - DNA, 25 bp, Homo sapiens
tacggacagacctaccacgacttag

SEQ ID NO: 5730 - DNA, 24 bp, Homo sapiens
acctcaaagttggaaccggtcaaa

SEQ ID NO: 5731 - DNA, 24 bp, Homo sapiens
cctcaaagttggaaccggtcaaag

SEQ ID NO: 5732 - DNA, 24 bp, Homo sapiens
tacctcaaagttggaaccggtcaa

SEQ ID NO: 5733 - DNA, 24 bp, Homo sapiens
ggacccgtgtaagacaaaccttgg

SEQ ID NO: 5734 - DNA, 25 bp, Homo sapiens
agagaagaagatagacccgaaagaa

SEQ ID NO: 5735 - DNA, 25 bp, Homo sapiens
tggaggatagaggagtagtagtagt

SEQ ID NO: 5736 - DNA, 24 bp, Homo sapiens
gagacagagtcgtggaagtccttg

SEQ ID NO: 5737 - DNA, 25 bp, Homo sapiens
aaccaggaacaatcgaagatagact

SEQ ID NO: 5738 - DNA, 24 bp, Homo sapiens
tgagaagtcttcgtcgttgtcccg

SEQ ID NO: 5739 - DNA, 24 bp, Homo sapiens
agcgagagacaagtcgtcgttgac

SEQ ID NO: 5740 - DNA, 25 bp, Homo sapiens
ggaggtagtcaactggtagaggtag

SEQ ID NO: 5741 - DNA, 23 bp, Homo sapiens
accatacgtcactactctgcgga

SEQ ID NO: 5742 - DNA, 24 bp, Homo sapiens
ggagttgtggtcgtttcgggagtt

SEQ ID NO: 5743 - DNA, 24 bp, Homo sapiens
tgtagtaagtgtagaacctgtcgt

SEQ ID NO: 5744 - DNA, 24 bp, Homo sapiens
cggagaaggagacaaccaactact

SEQ ID NO: 5745 - DNA, 24 bp, Homo sapiens
cggagaaggagacaaccaactact

SEQ ID NO: 5746 - DNA, 24 bp, Homo sapiens
cgacgacttctgataggtggtcca

SEQ ID NO: 5747 - DNA, 24 bp, Homo sapiens
ctcctgtccgaggtgtcccttcag

SEQ ID NO: 5748 - DNA, 24 bp, Homo sapiens
ggtacttcgctgagacaccagaga

SEQ ID NO: 5749 - DNA, 24 bp, Homo sapiens
ggagttgtggtcgtttcgggagtt

SEQ ID NO: 5750 - DNA, 24 bp, Homo sapiens
tgtagtaagtgtagaacctgtcgt

SEQ ID NO: 5751 - DNA, 24 bp, Homo sapiens
aaccacactctaagataccaccaa

SEQ ID NO: 5752 - DNA, 24 bp, Homo sapiens
agaagaccttgagagacttaagct

SEQ ID NO: 5753 - DNA, 24 bp, Homo sapiens
gaagaccttgagagacttaagcta

SEQ ID NO: 5754 - DNA, 24 bp, Homo sapiens
cagaagaccttgagagacttaagc

SEQ ID NO: 5755 - DNA, 25 bp, Homo sapiens
gagtgtgacaagcgacagaagacct

SEQ ID NO: 5756 - DNA, 25 bp, Homo sapiens
aggtaggaggactctttgtgacacg

SEQ ID NO: 5757 - DNA, 25 bp, Homo sapiens
acagagaagcgacatatcaaggtaa

SEQ ID NO: 5758 - DNA, 24 bp, Homo sapiens
catgtgtcgatgtatcgtttcacg

SEQ ID NO: 5759 - DNA, 25 bp, Homo sapiens
acctgacatctgactttgaaggata

SEQ ID NO: 5760 - DNA, 25 bp, Homo sapiens
actctacacattccgtccaaccagg

SEQ ID NO: 5761 - DNA, 24 bp, Homo sapiens
gtagtcgtagtggacgtagaagtg

SEQ ID NO: 5762 - DNA, 24 bp, Homo sapiens
tagtcgtagtggacgtagaagtga

SEQ ID NO: 5763 - DNA, 24 bp, Homo sapiens
ggtagtcgtagtggacgtagaagt

SEQ ID NO: 5764 - DNA, 24 bp, Homo sapiens
tttaagtgaatgaaaagctcagac

SEQ ID NO: 5765 - DNA, 24 bp, Homo sapiens
ttaagtgaatgaaaagctcagacg

SEQ ID NO: 5766 - DNA, 24 bp, Homo sapiens
gtttaagtgaatgaaaagctcaga

SEQ ID NO: 5767 - DNA, 24 bp, Homo sapiens
attaaccgttcgtcgagtcccgta

SEQ ID NO: 5768 - DNA, 24 bp, Homo sapiens
ttaccacaaaaagaatcgttgtac

SEQ ID NO: 5769 - DNA, 24 bp, Homo sapiens
aagttagagaagtctccaatcaaa

SEQ ID NO: 5770 - DNA, 24 bp, Homo sapiens
tacgaggtctactagttacctttt

SEQ ID NO: 5771 - DNA, 24 bp, Homo sapiens
acgaggtctactagttaccttttc

SEQ ID NO: 5772 - DNA, 24 bp, Homo sapiens
atacgaggtctactagttaccttt

SEQ ID NO: 5773 - DNA, 25 bp, Homo sapiens
ttaccctcacagtaccgttcagaac

SEQ ID NO: 5774 - DNA, 25 bp, Homo sapiens
aatgacaagaatacgaggtctacta

SEQ ID NO: 5775 - DNA, 23 bp, Homo sapiens
cgtctaccgccgagtgtgaggaa

SEQ ID NO: 5776 - DNA, 24 bp, Homo sapiens
ctagaaactcgtgtcttgactacc

SEQ ID NO: 5777 - DNA, 24 bp, Homo sapiens
tagaaactcgtgtcttgactacct

SEQ ID NO: 5778 - DNA, 24 bp, Homo sapiens
cctagaaactcgtgtcttgactac

SEQ ID NO: 5779 - DNA, 25 bp, Homo sapiens
gtaacattcatcgcagtgttcgtcg

SEQ ID NO: 5780 - DNA, 25 bp, Homo sapiens
cgtgtgcggagagagtttaggagtc

SEQ ID NO: 5781 - DNA, 25 bp, Homo sapiens
aagacctgtattcgtagttgaagca

SEQ ID NO: 5782 - DNA, 25 bp, Homo sapiens
gaggatgacgaaagaattttagaaa

SEQ ID NO: 5783 - DNA, 23 bp, Homo sapiens
acaaagacctaccattttttaag

SEQ ID NO: 5784 - DNA, 25 bp, Homo sapiens
gagttaccgccattgaggtccttgg

SEQ ID NO: 5785 - DNA, 25 bp, Homo sapiens
aaatgtcgtagtcgtgagagaggca

SEQ ID NO: 5786 - DNA, 25 bp, Homo sapiens
agttaagagtgagcttggtgtggtc

SEQ ID NO: 5787 - DNA, 25 bp, Homo sapiens
actctaagcgaccgtagtcacagac

SEQ ID NO: 5788 - DNA, 25 bp, Homo sapiens
agtcttgtcgtagaagtagtcagga

SEQ ID NO: 5789 - DNA, 25 bp, Homo sapiens
cttcgacatagtctaagtcagtaag

SEQ ID NO: 5790 - DNA, 24 bp, Homo sapiens
ggcgtaaacgaccgaaacaggtga

SEQ ID NO: 5791 - DNA, 24 bp, Homo sapiens
cgaccgaccaactcccatagacga

SEQ ID NO: 5792 - DNA, 24 bp, Homo sapiens
cggacctaaaatagaactttatga

SEQ ID NO: 5793 - DNA, 23 bp, Homo sapiens
tacacgcctaaccgactcaaccg

SEQ ID NO: 5794 - DNA, 25 bp, Homo sapiens
gttcgtgcaacataccatcaacctc

SEQ ID NO: 5795 - DNA, 25 bp, Homo sapiens
gctccctgtaacactcccatacctt

SEQ ID NO: 5796 - DNA, 25 bp, Homo sapiens
gctcaggtagaactcaccagactct

SEQ ID NO: 5797 - DNA, 25 bp, Homo sapiens
ttcgtaccgtggcatgatccaacta

SEQ ID NO: 5798 - DNA, 25 bp, Homo sapiens
gcagtaacaacctcaagaccaacga

SEQ ID NO: 5799 - DNA, 25 bp, Homo sapiens
gcagtaacaacctcaagaccaacga

SEQ ID NO: 5800 - DNA, 25 bp, Homo sapiens
ccactaacaacagcacctacaaccg

SEQ ID NO: 5801 - DNA, 25 bp, Homo sapiens
agtaagaggagcagactcagtagac

SEQ ID NO: 5802 - DNA, 25 bp, Homo sapiens
ccacgatacactataggagaagaag

SEQ ID NO: 5803 - DNA, 25 bp, Homo sapiens
acgacaagcgacttatcttggctgg

SEQ ID NO: 5804 - DNA, 25 bp, Homo sapiens
ccgcatgttataccttgctagaaga

SEQ ID NO: 5805 - DNA, 24 bp, Homo sapiens
aaaggaaagtggacgtgacaggac

SEQ ID NO: 5806 - DNA, 24 bp, Homo sapiens
aaggaaagtggacgtgacaggact

SEQ ID NO: 5807 - DNA, 24 bp, Homo sapiens
gaaaggaaagtggacgtgacagga

SEQ ID NO: 5808 - DNA, 25 bp, Homo sapiens
acagtcatctatgagaccaggagag

SEQ ID NO: 5809 - DNA, 25 bp, Homo sapiens
aagtggtggtgttctggtcaagaga

SEQ ID NO: 5810 - DNA, 25 bp, Homo sapiens
tgatcttgtcacctctggttgttaa

SEQ ID NO: 5811 - DNA, 24 bp, Homo sapiens
gctacggtattaaaactccaggta

SEQ ID NO: 5812 - DNA, 24 bp, Homo sapiens
ctacggtattaaaactccaggtaa

SEQ ID NO: 5813 - DNA, 24 bp, Homo sapiens
tgctacggtattaaaactccaggt

SEQ ID NO: 5814 - DNA, 24 bp, Homo sapiens
gaaagtcgactgagctgcggcgtc

SEQ ID NO: 5815 - DNA, 24 bp, Homo sapiens
aaagtcgactgagctgcggcgtca

SEQ ID NO: 5816 - DNA, 24 bp, Homo sapiens
agaaagtcgactgagctgcggcgt

SEQ ID NO: 5817 - DNA, 24 bp, Homo sapiens
gtaccggcttgacacgtttcacaa

SEQ ID NO: 5818 - DNA, 24 bp, Homo sapiens
aagactgtaccggcttgacacgtt

SEQ ID NO: 5819 - DNA, 24 bp, Homo sapiens
tcgtcgatacgcatggaagaggag

SEQ ID NO: 5820 - DNA, 24 bp, Homo sapiens
tttaaggggacccccacgtactca

SEQ ID NO: 5821 - DNA, 24 bp, Homo sapiens
ttcatcatcggcttgcagtaactt

SEQ ID NO: 5822 - DNA, 24 bp, Homo sapiens
agaagtgtccgcacttgactaggt

SEQ ID NO: 5823 - DNA, 24 bp, Homo sapiens
gactactgaatgtcacgtctgagg

SEQ ID NO: 5824 - DNA, 24 bp, Homo sapiens
actactgaatgtcacgtctgaggt

SEQ ID NO: 5825 - DNA, 24 bp, Homo sapiens
tgactactgaatgtcacgtctgag

SEQ ID NO: 5826 - DNA, 24 bp, Homo sapiens
aggtcctccccgtacttactactt

SEQ ID NO: 5827 - DNA, 24 bp, Homo sapiens
gtcgtgggaacagccggtaccgaa

SEQ ID NO: 5828 - DNA, 24 bp, Homo sapiens
tcgtgggaacagccggtaccgaaa

SEQ ID NO: 5829 - DNA, 24 bp, Homo sapiens
agtcgtgggaacagccggtaccga

SEQ ID NO: 5830 - DNA, 23 bp, Homo sapiens
ttcacgagaatagtagcacgctg

SEQ ID NO: 5831 - DNA, 23 bp, Homo sapiens
ggaccgaaacccaaactctgcgt

SEQ ID NO: 5832 - DNA, 25 bp, Homo sapiens
actcacatatcaaagagcgaagagc

SEQ ID NO: 5833 - DNA, 23 bp, Homo sapiens
ggataccgagtgtccaacggaca

SEQ ID NO: 5834 - DNA, 23 bp, Homo sapiens
gtcttgaccataccctgaacgac

SEQ ID NO: 5835 - DNA, 25 bp, Homo sapiens
agaaactttcggttgagacgtatgg

SEQ ID NO: 5836 - DNA, 25 bp, Homo sapiens
agaaactttccgtcggtattcctgg

SEQ ID NO: 5837 - DNA, 25 bp, Homo sapiens
ttgaccataccctgaacgactttgt

SEQ ID NO: 5838 - DNA, 23 bp, Homo sapiens
gcgttccacagctcatgtaagaa

SEQ ID NO: 5839 - DNA, 24 bp, Homo sapiens
acaccaacggaagacaatctttat

SEQ ID NO: 5840 - DNA, 24 bp, Homo sapiens
caccaacggaagacaatctttatc

SEQ ID NO: 5841 - DNA, 24 bp, Homo sapiens
gacaccaacggaagacaatcttta

SEQ ID NO: 5842 - DNA, 25 bp, Homo sapiens
cgtataagaccgtaactgactccgt

SEQ ID NO: 5843 - DNA, 23 bp, Homo sapiens
gattacaggtccgccagtcaaca

SEQ ID NO: 5844 - DNA, 25 bp, Homo sapiens
cagactgtcggttcataaggtcatg

SEQ ID NO: 5845 - DNA, 25 bp, Homo sapiens
aattgtggttagagctgtcgagagg

SEQ ID NO: 5846 - DNA, 25 bp, Homo sapiens
agaggataacggtgttgaaagggaa

SEQ ID NO: 5847 - DNA, 25 bp, Homo sapiens
tttctaggttcagttagtttcgtcg

SEQ ID NO: 5848 - DNA, 23 bp, Homo sapiens
tactgagggtgtcgtccttgagg

SEQ ID NO: 5849 - DNA, 23 bp, Homo sapiens
aagagaaccgacaggaacgtgaa

SEQ ID NO: 5850 - DNA, 25 bp, Homo sapiens
tgtgtacttcgttaggtggcttctt

SEQ ID NO: 5851 - DNA, 23 bp, Homo sapiens
tactgagggtgtcgtccttgagg

SEQ ID NO: 5852 - DNA, 25 bp, Homo sapiens
tttcagaagacgacccataagtaga

SEQ ID NO: 5853 - DNA, 23 bp, Homo sapiens
aagagaaccgacaggaacgtgaa

SEQ ID NO: 5854 - DNA, 24 bp, Homo sapiens
attgacgagttggactcttactct

SEQ ID NO: 5855 - DNA, 24 bp, Homo sapiens
ttgacgagttggactcttactctt

SEQ ID NO: 5856 - DNA, 24 bp, Homo sapiens
gattgacgagttggactcttactc

SEQ ID NO: 5857 - DNA, 24 bp, Homo sapiens
ttgaggaagtgttagtggtaggaa

SEQ ID NO: 5858 - DNA, 25 bp, Homo sapiens
acgaggacaagtagaagatgtagaa

SEQ ID NO: 5859 - DNA, 25 bp, Homo sapiens
acgaaagtctgtatagttcaagtct

SEQ ID NO: 5860 - DNA, 25 bp, Homo sapiens
aggtactcaccaggtaataaccaca

SEQ ID NO: 5861 - DNA, 25 bp, Homo sapiens
agtcatctgttgtacgatctaagca

SEQ ID NO: 5862 - DNA, 25 bp, Homo sapiens
gaacgcttactcctcttacgaacga

SEQ ID NO: 5863 - DNA, 25 bp, Homo sapiens
actgattgacgagttggactcttac

SEQ ID NO: 5864 - DNA, 25 bp, Homo sapiens
acgaaagtctgtatagttcaagtct

SEQ ID NO: 5865 - DNA, 25 bp, Homo sapiens
tgaccaactaaaggtaaacggtaaa

SEQ ID NO: 5866 - DNA, 25 bp, Homo sapiens
gtatttctaaagacgacttcaggta

SEQ ID NO: 5867 - DNA, 25 bp, Homo sapiens
actacccaagaacgaaggaaacgcc

SEQ ID NO: 5868 - DNA, 25 bp, Homo sapiens
acctcagagaccttattgtagttcc

SEQ ID NO: 5869 - DNA, 25 bp, Homo sapiens
cggtagttcccttgttcttatgtcg

SEQ ID NO: 5870 - DNA, 25 bp, Homo sapiens
cgaacccgttctcatttctcccgta

SEQ ID NO: 5871 - DNA, 24 bp, Homo sapiens
cgaggaaccgaagatgaaggaccg

SEQ ID NO: 5872 - DNA, 23 bp, Homo sapiens
caagttgagcgacggcggtgttg

SEQ ID NO: 5873 - DNA, 25 bp, Homo sapiens
cggtagttcccttgttcttatgtcg

SEQ ID NO: 5874 - DNA, 25 bp, Homo sapiens
cgaacccgttctcatttctcccgta

SEQ ID NO: 5875 - DNA, 25 bp, Homo sapiens
cggtaatgccatacgaagttctcca

SEQ ID NO: 5876 - DNA, 25 bp, Homo sapiens
actacgtctgtgactgtctcgaagt

SEQ ID NO: 5877 - DNA, 24 bp, Homo sapiens
aacaccgactatgtagttgcctga

SEQ ID NO: 5878 - DNA, 24 bp, Homo sapiens
cctacctggaagttaccaatgact

SEQ ID NO: 5879 - DNA, 24 bp, Homo sapiens
tcaaacctttccttacggaccact

SEQ ID NO: 5880 - DNA, 24 bp, Homo sapiens
ggaagagccttagaagtgaccatc

SEQ ID NO: 5881 - DNA, 24 bp, Homo sapiens
atgagatccaggtcctctacgacg

SEQ ID NO: 5882 - DNA, 24 bp, Homo sapiens
tcaaacctttccttacggaccact

SEQ ID NO: 5883 - DNA, 24 bp, Homo sapiens
ggaagagccttagaagtgaccatc

SEQ ID NO: 5884 - DNA, 24 bp, Homo sapiens
acgaagacaacgttgacaacggag

SEQ ID NO: 5885 - DNA, 24 bp, Homo sapiens
cgaagacaacgttgacaacggagt

SEQ ID NO: 5886 - DNA, 24 bp, Homo sapiens
gacgaagacaacgttgacaacgga

SEQ ID NO: 5887 - DNA, 24 bp, Homo sapiens
tcgatagacccggagttacagaaa

SEQ ID NO: 5888 - DNA, 24 bp, Homo sapiens
cgatagacccggagttacagaaac

SEQ ID NO: 5889 - DNA, 24 bp, Homo sapiens
atcgatagacccggagttacagaa

SEQ ID NO: 5890 - DNA, 24 bp, Homo sapiens
acttgtcgtagagaatttaaaagt

SEQ ID NO: 5891 - DNA, 24 bp, Homo sapiens
cttgtcgtagagaatttaaaagta

SEQ ID NO: 5892 - DNA, 24 bp, Homo sapiens
gacttgtcgtagagaatttaaaag

SEQ ID NO: 5893 - DNA, 24 bp, Homo sapiens
tcagtggtaatggaacccgaagaa

SEQ ID NO: 5894 - DNA, 24 bp, Homo sapiens
cagtggtaatggaacccgaagaag

SEQ ID NO: 5895 - DNA, 24 bp, Homo sapiens
atcagtggtaatggaacccgaaga

SEQ ID NO: 5896 - DNA, 24 bp, Homo sapiens
ccactcaagcgacaactaacgata

SEQ ID NO: 5897 - DNA, 25 bp, Homo sapiens
agaaatagaagaagtgactctcggt

SEQ ID NO: 5898 - DNA, 25 bp, Homo sapiens
cgacgtgtcaccttatattataacc

SEQ ID NO: 5899 - DNA, 25 bp, Homo sapiens
agtggaatcctgttctggagtcgtt

SEQ ID NO: 5900 - DNA, 23 bp, Homo sapiens
tgagcgagaacaccacagacagg

SEQ ID NO: 5901 - DNA, 24 bp, Homo sapiens
ccactcaagcgacaactaacgata

SEQ ID NO: 5902 - DNA, 24 bp, Homo sapiens
agactaaaagtggttaagagacca

SEQ ID NO: 5903 - DNA, 24 bp, Homo sapiens
gactaaaagtggttaagagaccaa

SEQ ID NO: 5904 - DNA, 24 bp, Homo sapiens
aagactaaaagtggttaagagacc

SEQ ID NO: 5905 - DNA, 24 bp, Homo sapiens
cccttgaacatggaaatacgacca

SEQ ID NO: 5906 - DNA, 24 bp, Homo sapiens
ccttgaacatggaaatacgaccaa

SEQ ID NO: 5907 - DNA, 24 bp, Homo sapiens
ccccttgaacatggaaatacgacc

SEQ ID NO: 5908 - DNA, 25 bp, Homo sapiens
tccgaaggtgtgagtggttgaagac

SEQ ID NO: 5909 - DNA, 25 bp, Homo sapiens
gcttcccgatgttcgttgacaagtt

SEQ ID NO: 5910 - DNA, 25 bp, Homo sapiens
cgagactgtaacggacttgaagtac

SEQ ID NO: 5911 - DNA, 25 bp, Homo sapiens
cgagactgtaacggacttgaagtac

SEQ ID NO: 5912 - DNA, 24 bp, Homo sapiens
gccttgggttcagttagtggacga

SEQ ID NO: 5913 - DNA, 25 bp, Homo sapiens
ttagaactgactcgtactgtctcaa

SEQ ID NO: 5914 - DNA, 24 bp, Homo sapiens
aacctcggtctagtggtgttcaca

SEQ ID NO: 5915 - DNA, 24 bp, Homo sapiens
agggaactaaagtctcaacctcca

SEQ ID NO: 5916 - DNA, 25 bp, Homo sapiens
agtctattctccaccatcgttgttg

SEQ ID NO: 5917 - DNA, 24 bp, Homo sapiens
tttcgtgacccggacacttttctt

SEQ ID NO: 5918 - DNA, 24 bp, Homo sapiens
ttcgtgacccggacacttttcttt

SEQ ID NO: 5919 - DNA, 24 bp, Homo sapiens
ttttcgtgacccggacacttttct

SEQ ID NO: 5920 - DNA, 25 bp, Homo sapiens
aaagggagtgataattaccgctcta

SEQ ID NO: 5921 - DNA, 23 bp, Homo sapiens
actcggacagaggaatcgtgctc

SEQ ID NO: 5922 - DNA, 23 bp, Homo sapiens
acaagaaagacagagcgcccgtg

SEQ ID NO: 5923 - DNA, 25 bp, Homo sapiens
taccacgacagcacaacctcttcag

SEQ ID NO: 5924 - DNA, 25 bp, Homo sapiens
ctgacgaacctgctctccttgacac

SEQ ID NO: 5925 - DNA, 25 bp, Homo sapiens
tgatgacaaagacgacgacaagggt

SEQ ID NO: 5926 - DNA, 25 bp, Homo sapiens
tctatacggtagtcctgttgcctaa

SEQ ID NO: 5927 - DNA, 25 bp, Homo sapiens
aagtttaacagatgctcgtggtagt

SEQ ID NO: 5928 - DNA, 25 bp, Homo sapiens
tggtgtagtagtagacattcgtggt

SEQ ID NO: 5929 - DNA, 25 bp, Homo sapiens
aagtttaacagatgctcgtggtagt

SEQ ID NO: 5930 - DNA, 25 bp, Homo sapiens
tggtgtagtagtagacattcgtggt

SEQ ID NO: 5931 - DNA, 24 bp, Homo sapiens
tcaacatctagtgaagacccgccg

SEQ ID NO: 5932 - DNA, 25 bp, Homo sapiens
aagtttaacagatgctcgtggtagt

SEQ ID NO: 5933 - DNA, 25 bp, Homo sapiens
actctccctcctagtaaagaaggtc

SEQ ID NO: 5934 - DNA, 25 bp, Homo sapiens
tggtgtagtagtagacattcgtggt

SEQ ID NO: 5935 - DNA, 24 bp, Homo sapiens
atcaagccgttcgaaatcgaatac

SEQ ID NO: 5936 - DNA, 24 bp, Homo sapiens
tcaagccgttcgaaatcgaatacc

SEQ ID NO: 5937 - DNA, 24 bp, Homo sapiens
aatcaagccgttcgaaatcgaata

SEQ ID NO: 5938 - DNA, 24 bp, Homo sapiens
gaagacgtaagagagtcagacacc

SEQ ID NO: 5939 - DNA, 24 bp, Homo sapiens
aagacgtaagagagtcagacacca

SEQ ID NO: 5940 - DNA, 24 bp, Homo sapiens
agaagacgtaagagagtcagacac

SEQ ID NO: 5941 - DNA, 24 bp, Homo sapiens
aagaagagacgacggtgtagttgt

SEQ ID NO: 5942 - DNA, 25 bp, Homo sapiens
tgagaggttcgagtgtccatgtaac

SEQ ID NO: 5943 - DNA, 24 bp, Homo sapiens
tttagggtttggatcgacgggctc

SEQ ID NO: 5944 - DNA, 25 bp, Homo sapiens
gaagaagtaaacggaggagaagtcg

SEQ ID NO: 5945 - DNA, 25 bp, Homo sapiens
acccgaaacaaagaagaaggagaca

SEQ ID NO: 5946 - DNA, 24 bp, Homo sapiens
aagaagagacgacggtgtagttgt

SEQ ID NO: 5947 - DNA, 25 bp, Homo sapiens
agaggtttggtgctcgttctgtaag

SEQ ID NO: 5948 - DNA, 23 bp, Homo sapiens
ggacctcagacacctattctaga

SEQ ID NO: 5949 - DNA, 25 bp, Homo sapiens
acccgaaacaaagaagaaggagaca

SEQ ID NO: 5950 - DNA, 24 bp, Homo sapiens
aagaagagacgacggtgtagttgt

SEQ ID NO: 5951 - DNA, 25 bp, Homo sapiens
actgttagggtttagcgaggaagga

SEQ ID NO: 5952 - DNA, 24 bp, Homo sapiens
tttcgttaaatgcaaaagcggaga

SEQ ID NO: 5953 - DNA, 24 bp, Homo sapiens
ttcgttaaatgcaaaagcggagaa

SEQ ID NO: 5954 - DNA, 24 bp, Homo sapiens
ttttcgttaaatgcaaaagcggag

SEQ ID NO: 5955 - DNA, 24 bp, Homo sapiens
ttagaaggtgccagaccgtaccac

SEQ ID NO: 5956 - DNA, 25 bp, Homo sapiens
cggaggttaatagaggatgaagtca

SEQ ID NO: 5957 - DNA, 25 bp, Homo sapiens
agtgtcaagtgtcgtgtcggattct

SEQ ID NO: 5958 - DNA, 24 bp, Homo sapiens
acctacgacaagttcagatgtgga

SEQ ID NO: 5959 - DNA, 24 bp, Homo sapiens
acgaaagaagccagtccagaagtt

SEQ ID NO: 5960 - DNA, 24 bp, Homo sapiens
ggtaacgctctctggcactaaggt

SEQ ID NO: 5961 - DNA, 24 bp, Homo sapiens
gacttctaggtaacgctctctggc

SEQ ID NO: 5962 - DNA, 24 bp, Homo sapiens
ttgcacaggaccgcagaaggttta

SEQ ID NO: 5963 - DNA, 24 bp, Homo sapiens
tagaatgattgtcgtagtagtaca

SEQ ID NO: 5964 - DNA, 24 bp, Homo sapiens
cgtcttatatcggacaacagtacg

SEQ ID NO: 5965 - DNA, 24 bp, Homo sapiens
ctgaaacgtgtggagtttgtagag

SEQ ID NO: 5966 - DNA, 24 bp, Homo sapiens
tgaaacgtgtggagtttgtagagt

SEQ ID NO: 5967 - DNA, 24 bp, Homo sapiens
cctgaaacgtgtggagtttgtaga

SEQ ID NO: 5968 - DNA, 24 bp, Homo sapiens
actctgtggatggttgaagtatat

SEQ ID NO: 5969 - DNA, 24 bp, Homo sapiens
ctctgtggatggttgaagtatata

SEQ ID NO: 5970 - DNA, 24 bp, Homo sapiens
aactctgtggatggttgaagtata

SEQ ID NO: 5971 - DNA, 25 bp, Homo sapiens
acaggtattacatacacaagactgc

SEQ ID NO: 5972 - DNA, 25 bp, Homo sapiens
acacaaccatttctgcggtaagtct

SEQ ID NO: 5973 - DNA, 23 bp, Homo sapiens
gaagactcgcggcggtgaaacgg

SEQ ID NO: 5974 - DNA, 25 bp, Homo sapiens
acggacggtagaggaatcagacact

SEQ ID NO: 5975 - DNA, 24 bp, Homo sapiens
cgcctcctctctttgtctctaccg

SEQ ID NO: 5976 - DNA, 24 bp, Homo sapiens
agaggtcatacttgtgctaccaca

SEQ ID NO: 5977 - DNA, 24 bp, Homo sapiens
gaggtcatacttgtgctaccacag

SEQ ID NO: 5978 - DNA, 24 bp, Homo sapiens
gagaggtcatacttgtgctaccac

SEQ ID NO: 5979 - DNA, 24 bp, Homo sapiens
aagggtgtaagtgatgtaagtatc

SEQ ID NO: 5980 - DNA, 24 bp, Homo sapiens
acattgttccacactggagaccga

SEQ ID NO: 5981 - DNA, 24 bp, Homo sapiens
tcccgaagagaggtcatacctaaa

SEQ ID NO: 5982 - DNA, 24 bp, Homo sapiens
gagaggtcatacttgtgctaccac

SEQ ID NO: 5983 - DNA, 24 bp, Homo sapiens
cgatttccgaaagggtgtaagtga

SEQ ID NO: 5984 - DNA, 24 bp, Homo sapiens
acgtgactatcccgaagagaggtc

SEQ ID NO: 5985 - DNA, 24 bp, Homo sapiens
taaaagacgttggacgcaaacagg

SEQ ID NO: 5986 - DNA, 24 bp, Homo sapiens
aaaagacgttggacgcaaacaggg

SEQ ID NO: 5987 - DNA, 24 bp, Homo sapiens
ctaaaagacgttggacgcaaacag

SEQ ID NO: 5988 - DNA, 25 bp, Homo sapiens
acactctggcatgagtctcactcct

SEQ ID NO: 5989 - DNA, 23 bp, Homo sapiens
ggctgaccgaccatgatctgcgt

SEQ ID NO: 5990 - DNA, 23 bp, Homo sapiens
acgaaggaggactggcagacacc

SEQ ID NO: 5991 - DNA, 25 bp, Homo sapiens
tccgaatccatccctaaccgaccaa

SEQ ID NO: 5992 - DNA, 25 bp, Homo sapiens
agaggtagtcaagaagaactggaca

SEQ ID NO: 5993 - DNA, 23 bp, Homo sapiens
ggctgaccgaccatgatctgcgt

SEQ ID NO: 5994 - DNA, 23 bp, Homo sapiens
acgaaggaggactggcagacacc

SEQ ID NO: 5995 - DNA, 25 bp, Homo sapiens
gtgtgaaggtaacaagagtggttcc

SEQ ID NO: 5996 - DNA, 25 bp, Homo sapiens
tctgaacgacctaccctcctttact

SEQ ID NO: 5997 - DNA, 25 bp, Homo sapiens
ccagacaacaatcagacgacgaagg

SEQ ID NO: 5998 - DNA, 24 bp, Homo sapiens
catggcaggttagaaacacagttc

SEQ ID NO: 5999 - DNA, 24 bp, Homo sapiens
atggcaggttagaaacacagttca

SEQ ID NO: 6000 - DNA, 24 bp, Homo sapiens
acatggcaggttagaaacacagtt

SEQ ID NO: 6001 - DNA, 24 bp, Homo sapiens
ggcaggttagaaacacagttcacg

SEQ ID NO: 6002 - DNA, 24 bp, Homo sapiens
actcctctcaacgcttatgtgaca

SEQ ID NO: 6003 - DNA, 24 bp, Homo sapiens
gcaaagacacaacttccgaaacca

SEQ ID NO: 6004 - DNA, 24 bp, Homo sapiens
acagtttaggttcaaacacttcgt

SEQ ID NO: 6005 - DNA, 24 bp, Homo sapiens
actcctctcaacgcttatgtgaca

SEQ ID NO: 6006 - DNA, 24 bp, Homo sapiens
gcaaagacacaacttccgaaacca

SEQ ID NO: 6007 - DNA, 24 bp, Homo sapiens
tatccctcaccaccatcggacacc

SEQ ID NO: 6008 - DNA, 24 bp, Homo sapiens
tgatcaagtgcttgcagtgtccgt

SEQ ID NO: 6009 - DNA, 24 bp, Homo sapiens
ggtgctacaaccgtcctcaatcga

SEQ ID NO: 6010 - DNA, 25 bp, Homo sapiens
gttgaaccgtaactaaggaacctaa

SEQ ID NO: 6011 - DNA, 25 bp, Homo sapiens
cgattcccaccaccgtctaaacact

SEQ ID NO: 6012 - DNA, 25 bp, Homo sapiens
agacccacccaagagactctcaaca

SEQ ID NO: 6013 - DNA, 25 bp, Homo sapiens
ttccgaagtcgtacatggtagaact

SEQ ID NO: 6014 - DNA, 25 bp, Homo sapiens
ttggttgttgaagtaaggctgagtt

SEQ ID NO: 6015 - DNA, 25 bp, Homo sapiens
ccagatgttctactcgtcgttatga

SEQ ID NO: 6016 - DNA, 25 bp, Homo sapiens
tcaagagtcttcaccgtccgaatcg

SEQ ID NO: 6017 - DNA, 25 bp, Homo sapiens
aggagtagacttaggtgattgtgac

SEQ ID NO: 6018 - DNA, 25 bp, Homo sapiens
tgtgtctgaaggttctattgtgtta

SEQ ID NO: 6019 - DNA, 25 bp, Homo sapiens
tcggtagtgaactaacgtaagaaga

SEQ ID NO: 6020 - DNA, 25 bp, Homo sapiens
tgaagtagacaaggacatcggaggt

SEQ ID NO: 6021 - DNA, 25 bp, Homo sapiens
tcgtctatatttaaaccaaaaatcg

SEQ ID NO: 6022 - DNA, 23 bp, Homo sapiens
gcgaaggcagcgaggagtagtag

SEQ ID NO: 6023 - DNA, 25 bp, Homo sapiens
agttgtttcaaggtgtcgtaggtcc

SEQ ID NO: 6024 - DNA, 24 bp, Homo sapiens
tctctcgggttctggtacttcggt

SEQ ID NO: 6025 - DNA, 24 bp, Homo sapiens
cagaacctgagaacgaggctacgg

SEQ ID NO: 6026 - DNA, 23 bp, Homo sapiens
cctgaaccttgccctagacacgg

SEQ ID NO: 6027 - DNA, 24 bp, Homo sapiens
actcaccgaggacacagacactga

SEQ ID NO: 6028 - DNA, 24 bp, Homo sapiens
aacttcggtatgggtttaaaacgt

SEQ ID NO: 6029 - DNA, 24 bp, Homo sapiens
acttcggtatgggtttaaaacgtc

SEQ ID NO: 6030 - DNA, 24 bp, Homo sapiens
gaacttcggtatgggtttaaaacg

SEQ ID NO: 6031 - DNA, 24 bp, Homo sapiens
gtttcggttcagagcttacatacg

SEQ ID NO: 6032 - DNA, 24 bp, Homo sapiens
tttcggttcagagcttacatacgt

SEQ ID NO: 6033 - DNA, 24 bp, Homo sapiens
ggtttcggttcagagcttacatac

SEQ ID NO: 6034 - DNA, 24 bp, Homo sapiens
agatcgtcgacggagtcaaacaag

SEQ ID NO: 6035 - DNA, 24 bp, Homo sapiens
gatcgtcgacggagtcaaacaagt

SEQ ID NO: 6036 - DNA, 24 bp, Homo sapiens
gagatcgtcgacggagtcaaacaa

SEQ ID NO: 6037 - DNA, 24 bp, Homo sapiens
acactgtccgagggaggtaatcgt

SEQ ID NO: 6038 - DNA, 24 bp, Homo sapiens
aacgaaggcattgaacgggtgagg

SEQ ID NO: 6039 - DNA, 24 bp, Homo sapiens
gtcgtagggtttcggctgtagtct

SEQ ID NO: 6040 - DNA, 24 bp, Homo sapiens
gatctcttctaggaacaacacggt

SEQ ID NO: 6041 - DNA, 24 bp, Homo sapiens
atctcttctaggaacaacacggtc

SEQ ID NO: 6042 - DNA, 24 bp, Homo sapiens
cgatctcttctaggaacaacacgg

SEQ ID NO: 6043 - DNA, 24 bp, Homo sapiens
gagagcgactacgatgttcctttt

SEQ ID NO: 6044 - DNA, 24 bp, Homo sapiens
agagcgactacgatgttccttttt

SEQ ID NO: 6045 - DNA, 24 bp, Homo sapiens
cgagagcgactacgatgttccttt

SEQ ID NO: 6046 - DNA, 24 bp, Homo sapiens
aggtaaggtagaggacgaggagcc

SEQ ID NO: 6047 - DNA, 24 bp, Homo sapiens
acctgagacttctgatactacgaa

SEQ ID NO: 6048 - DNA, 24 bp, Homo sapiens
ggacccgagagactaccttgacga

SEQ ID NO: 6049 - DNA, 24 bp, Homo sapiens
ggagtgacattcttggaactacga

SEQ ID NO: 6050 - DNA, 24 bp, Homo sapiens
agatagagaagagcgttagatggt

SEQ ID NO: 6051 - DNA, 24 bp, Homo sapiens
cagagccagagaggaacatggagt

SEQ ID NO: 6052 - DNA, 24 bp, Homo sapiens
accaccgataatatcagagccaga

SEQ ID NO: 6053 - DNA, 24 bp, Homo sapiens
acgactgtcagaaggaagatgtag

SEQ ID NO: 6054 - DNA, 24 bp, Homo sapiens
tctgacaagtaaacacggtctaca

SEQ ID NO: 6055 - DNA, 24 bp, Homo sapiens
accaccgataatatcagagccaga

SEQ ID NO: 6056 - DNA, 24 bp, Homo sapiens
acgactgtcagaaggaagatgtag

SEQ ID NO: 6057 - DNA, 24 bp, Homo sapiens
acagtaaacggtgaaattattgtc

SEQ ID NO: 6058 - DNA, 24 bp, Homo sapiens
cagtaaacggtgaaattattgtcc

SEQ ID NO: 6059 - DNA, 24 bp, Homo sapiens
aacagtaaacggtgaaattattgt

SEQ ID NO: 6060 - DNA, 24 bp, Homo sapiens
actgttaatcaggacataaccgtg

SEQ ID NO: 6061 - DNA, 24 bp, Homo sapiens
ctgttaatcaggacataaccgtga

SEQ ID NO: 6062 - DNA, 24 bp, Homo sapiens
gactgttaatcaggacataaccgt

SEQ ID NO: 6063 - DNA, 24 bp, Homo sapiens
ttcaaacgaaggaaccagacaacg

SEQ ID NO: 6064 - DNA, 24 bp, Homo sapiens
gacgacgaccgatactttgagtgg

SEQ ID NO: 6065 - DNA, 24 bp, Homo sapiens
cgggaaagaactcgtgtacctatt

SEQ ID NO: 6066 - DNA, 24 bp, Homo sapiens
agactgtgttgttaccgtacctcg

SEQ ID NO: 6067 - DNA, 24 bp, Homo sapiens
cctattctttggtccagcgtttcg

SEQ ID NO: 6068 - DNA, 24 bp, Homo sapiens
ttcaaacgaaggaaccagacaacg

SEQ ID NO: 6069 - DNA, 24 bp, Homo sapiens
tgaggtagagatagactgtgttgt

SEQ ID NO: 6070 - DNA, 24 bp, Homo sapiens
cctattctttggtccagcgtttcg

SEQ ID NO: 6071 - DNA, 24 bp, Homo sapiens
ttcaaacgaaggaaccagacaacg

SEQ ID NO: 6072 - DNA, 24 bp, Homo sapiens
agactgtgttgttaccgtacctcg

SEQ ID NO: 6073 - DNA, 24 bp, Homo sapiens
cctattctttggtccagcgtttcg

SEQ ID NO: 6074 - DNA, 24 bp, Homo sapiens
ttcaaacgaaggaaccagacaacg

SEQ ID NO: 6075 - DNA, 24 bp, Homo sapiens
gacgacgaccgatactttgagtgg

SEQ ID NO: 6076 - DNA, 25 bp, Homo sapiens
aagaaaagagagagacagaggaact

SEQ ID NO: 6077 - DNA, 24 bp, Homo sapiens
agaccccgtatgttgcaccgtcgt

SEQ ID NO: 6078 - DNA, 24 bp, Homo sapiens
gaccccgtatgttgcaccgtcgtc

SEQ ID NO: 6079 - DNA, 24 bp, Homo sapiens
aagaccccgtatgttgcaccgtcg

SEQ ID NO: 6080 - DNA, 23 bp, Homo sapiens
taggtgcggtggtgtaaacggaa

SEQ ID NO: 6081 - DNA, 25 bp, Homo sapiens
tttcctatcgtcgttggtttcggta

SEQ ID NO: 6082 - DNA, 24 bp, Homo sapiens
aagttcacgtcctactagactcga

SEQ ID NO: 6083 - DNA, 24 bp, Homo sapiens
aagttcacgtcctactagactcga

SEQ ID NO: 6084 - DNA, 25 bp, Homo sapiens
gtgtttccatacctaagtccgtagt

SEQ ID NO: 6085 - DNA, 24 bp, Homo sapiens
cgttccgttatccgaagacattaa

SEQ ID NO: 6086 - DNA, 24 bp, Homo sapiens
tcttctacactctactgtctgacg

SEQ ID NO: 6087 - DNA, 24 bp, Homo sapiens
atgtctcacaccattaaagcaaga

SEQ ID NO: 6088 - DNA, 24 bp, Homo sapiens
tgtctcacaccattaaagcaagaa

SEQ ID NO: 6089 - DNA, 24 bp, Homo sapiens
aatgtctcacaccattaaagcaag

SEQ ID NO: 6090 - DNA, 24 bp, Homo sapiens
tcccgttaaagtacgtcctacgct

SEQ ID NO: 6091 - DNA, 24 bp, Homo sapiens
ttcctcctcagtataacacgtcca

SEQ ID NO: 6092 - DNA, 24 bp, Homo sapiens
aacgatgaagcactgacactctcc

SEQ ID NO: 6093 - DNA, 24 bp, Homo sapiens
cgccgtgacagtattagaccgaag

SEQ ID NO: 6094 - DNA, 24 bp, Homo sapiens
aaacgaacgagtttgacaaaccgt

SEQ ID NO: 6095 - DNA, 24 bp, Homo sapiens
aagtacccgttgtcgaagggagtc

SEQ ID NO: 6096 - DNA, 24 bp, Homo sapiens
caaggtcccgtcgtgtcagaagtg

SEQ ID NO: 6097 - DNA, 24 bp, Homo sapiens
ggactagaaccagaacgaccagta

SEQ ID NO: 6098 - DNA, 24 bp, Homo sapiens
gggaggaccttggtggtttgagtc

SEQ ID NO: 6099 - DNA, 24 bp, Homo sapiens
caaggtcccgtcgtgtcagaagtg

SEQ ID NO: 6100 - DNA, 24 bp, Homo sapiens
accagaacgaccagtattggaagt

SEQ ID NO: 6101 - DNA, 24 bp, Homo sapiens
cgccactcaacgtctgtagactgt

SEQ ID NO: 6102 - DNA, 24 bp, Homo sapiens
aacgttgatacagggtcttaagag

SEQ ID NO: 6103 - DNA, 24 bp, Homo sapiens
cgttcaaggacaaaaagtagtcgg

SEQ ID NO: 6104 - DNA, 24 bp, Homo sapiens
aagaaaagtcgaaaagactgtcga

SEQ ID NO: 6105 - DNA, 24 bp, Homo sapiens
aaaggtttgtaacttcccgtgttt

SEQ ID NO: 6106 - DNA, 24 bp, Homo sapiens
actgacatcggtggtctcacttaa

SEQ ID NO: 6107 - DNA, 24 bp, Homo sapiens
aaagggtctcgtgaacgtaaacct

SEQ ID NO: 6108 - DNA, 24 bp, Homo sapiens
acaaccaacattcgttcaaggaca

SEQ ID NO: 6109 - DNA, 24 bp, Homo sapiens
aggtttgtaacttcccgtgtttca

SEQ ID NO: 6110 - DNA, 24 bp, Homo sapiens
cagcaactgacatcggtggtctca

SEQ ID NO: 6111 - DNA, 24 bp, Homo sapiens
cggcgacaataacgttgatacagg

SEQ ID NO: 6112 - DNA, 24 bp, Homo sapiens
acaaccaacattcgttcaaggaca

SEQ ID NO: 6113 - DNA, 24 bp, Homo sapiens
ccccattgaggaaagaaaagtcga

SEQ ID NO: 6114 - DNA, 24 bp, Homo sapiens
cgaagaagacctctcttttgatag

SEQ ID NO: 6115 - DNA, 24 bp, Homo sapiens
gaagaagacctctcttttgataga

SEQ ID NO: 6116 - DNA, 24 bp, Homo sapiens
acgaagaagacctctcttttgata

SEQ ID NO: 6117 - DNA, 24 bp, Homo sapiens
aggaaggtgtgagtgaggcaagtg

SEQ ID NO: 6118 - DNA, 24 bp, Homo sapiens
ggaaggtgtgagtgaggcaagtga

SEQ ID NO: 6119 - DNA, 24 bp, Homo sapiens
gaggaaggtgtgagtgaggcaagt

SEQ ID NO: 6120 - DNA, 24 bp, Homo sapiens
cgacggtgactacagatttaagag

SEQ ID NO: 6121 - DNA, 24 bp, Homo sapiens
ggaaggtgtgagtgaggcaagtga

SEQ ID NO: 6122 - DNA, 24 bp, Homo sapiens
tcgtcggaactcatcaaggtgtcg

SEQ ID NO: 6123 - DNA, 24 bp, Homo sapiens
acatagcgtggtggtcgaactgcg

SEQ ID NO: 6124 - DNA, 24 bp, Homo sapiens
accaaaagtctagacgtgtccttt

SEQ ID NO: 6125 - DNA, 24 bp, Homo sapiens
ccaaaagtctagacgtgtcctttt

SEQ ID NO: 6126 - DNA, 24 bp, Homo sapiens
taccaaaagtctagacgtgtcctt

SEQ ID NO: 6127 - DNA, 24 bp, Homo sapiens
gcatcatggataagaactccgcaa

SEQ ID NO: 6128 - DNA, 24 bp, Homo sapiens
tgagcgacattcagacggtactta

SEQ ID NO: 6129 - DNA, 24 bp, Homo sapiens
agaggtcctataaccgtgtaaaca

SEQ ID NO: 6130 - DNA, 24 bp, Homo sapiens
acaactgaacctcctagtcctcgt

SEQ ID NO: 6131 - DNA, 24 bp, Homo sapiens
tagatcaagtgtctgtgacggctt

SEQ ID NO: 6132 - DNA, 24 bp, Homo sapiens
acggtgttcttcagtagttgttcc

SEQ ID NO: 6133 - DNA, 24 bp, Homo sapiens
acacatccgtacttacttcgccga

SEQ ID NO: 6134 - DNA, 24 bp, Homo sapiens
tcaatacagtcaggttaaagaagt

SEQ ID NO: 6135 - DNA, 24 bp, Homo sapiens
acggtgttcttcagtagttgttcc

SEQ ID NO: 6136 - DNA, 24 bp, Homo sapiens
acttccctcactggtagatgtcac

SEQ ID NO: 6137 - DNA, 24 bp, Homo sapiens
acggtgttcttcagtagttgttcc

SEQ ID NO: 6138 - DNA, 24 bp, Homo sapiens
acttccctcactggtagatgtcac

SEQ ID NO: 6139 - DNA, 24 bp, Homo sapiens
acacatccgtacttacttcgccga

SEQ ID NO: 6140 - DNA, 24 bp, Homo sapiens
ttattcggaagagttttaatttct

SEQ ID NO: 6141 - DNA, 24 bp, Homo sapiens
ggggagggttttctttgagtaggt

SEQ ID NO: 6142 - DNA, 24 bp, Homo sapiens
gacgagttaacgaaattcctgtaa

SEQ ID NO: 6143 - DNA, 24 bp, Homo sapiens
gttcacttgaaaacctagacttga

SEQ ID NO: 6144 - DNA, 24 bp, Homo sapiens
ttcacttgaaaacctagacttgaa

SEQ ID NO: 6145 - DNA, 24 bp, Homo sapiens
cgttcacttgaaaacctagacttg

SEQ ID NO: 6146 - DNA, 24 bp, Homo sapiens
aatcgttcacttgaaaacctagac

SEQ ID NO: 6147 - DNA, 24 bp, Homo sapiens
aacatctaccctacagtcccgacg

SEQ ID NO: 6148 - DNA, 24 bp, Homo sapiens
gaacgaagcccaggactccaaggt

SEQ ID NO: 6149 - DNA, 24 bp, Homo sapiens
tttacatgaatgggtcctgagagt

SEQ ID NO: 6150 - DNA, 24 bp, Homo sapiens
ttacatgaatgggtcctgagagtt

SEQ ID NO: 6151 - DNA, 24 bp, Homo sapiens
ttttacatgaatgggtcctgagag

SEQ ID NO: 6152 - DNA, 24 bp, Homo sapiens
ttgtcaagaatggttgacccacgt

SEQ ID NO: 6153 - DNA, 24 bp, Homo sapiens
tgtcaagaatggttgacccacgtt

SEQ ID NO: 6154 - DNA, 24 bp, Homo sapiens
tttgtcaagaatggttgacccacg

SEQ ID NO: 6155 - DNA, 24 bp, Homo sapiens
tcggtcgtagtggacgttagacgg

SEQ ID NO: 6156 - DNA, 24 bp, Homo sapiens
cggtcgtagtggacgttagacggc

SEQ ID NO: 6157 - DNA, 24 bp, Homo sapiens
ctcggtcgtagtggacgttagacg

SEQ ID NO: 6158 - DNA, 25 bp, Homo sapiens
tcaaagtatgagaggtggaagaggt

SEQ ID NO: 6159 - DNA, 25 bp, Homo sapiens
actgatgaagactacttaggtgtta

SEQ ID NO: 6160 - DNA, 23 bp, Homo sapiens
ttcgcatctattcggtgtccacg

SEQ ID NO: 6161 - DNA, 24 bp, Homo sapiens
atgtgtgaagacacgaacctagag

SEQ ID NO: 6162 - DNA, 24 bp, Homo sapiens
tgtgtgaagacacgaacctagaga

SEQ ID NO: 6163 - DNA, 24 bp, Homo sapiens
gatgtgtgaagacacgaacctaga

SEQ ID NO: 6164 - DNA, 25 bp, Homo sapiens
agaggaaagttcaccgttcaagaga

SEQ ID NO: 6165 - DNA, 25 bp, Homo sapiens
tgtacggaagtcaactcgaagatca

SEQ ID NO: 6166 - DNA, 25 bp, Homo sapiens
actatctgttacggttgtgtcttcc

SEQ ID NO: 6167 - DNA, 24 bp, Homo sapiens
atttctctcttggacttacacgtt

SEQ ID NO: 6168 - DNA, 24 bp, Homo sapiens
tttctctcttggacttacacgttt

SEQ ID NO: 6169 - DNA, 24 bp, Homo sapiens
gatttctctcttggacttacacgt

SEQ ID NO: 6170 - DNA, 25 bp, Homo sapiens
cagatgataaggactcttctcgccg

SEQ ID NO: 6171 - DNA, 25 bp, Homo sapiens
agatacacgtaagaaggactccacc

SEQ ID NO: 6172 - DNA, 25 bp, Homo sapiens
ggtcgaagcgtacagtcactataga

SEQ ID NO: 6173 - DNA, 25 bp, Homo sapiens
cagatgataaggactcttctcgccg

SEQ ID NO: 6174 - DNA, 25 bp, Homo sapiens
tctacctgacctcagaagtccgacc

SEQ ID NO: 6175 - DNA, 25 bp, Homo sapiens
agttcggacaattcaacgaggacct

SEQ ID NO: 6176 - DNA, 24 bp, Homo sapiens
agtcactattcacacctggaacga

SEQ ID NO: 6177 - DNA, 24 bp, Homo sapiens
tggaaacatccgggagatcattga

SEQ ID NO: 6178 - DNA, 24 bp, Homo sapiens
acagagagttcaactttacctttg

SEQ ID NO: 6179 - DNA, 24 bp, Homo sapiens
cttgacctctctaagtcacgagcc

SEQ ID NO: 6180 - DNA, 24 bp, Homo sapiens
ttgacctctctaagtcacgagcca

SEQ ID NO: 6181 - DNA, 24 bp, Homo sapiens
tcttgacctctctaagtcacgagc

SEQ ID NO: 6182 - DNA, 25 bp, Homo sapiens
gctatgttcgtcagtaaggtccgtc

SEQ ID NO: 6183 - DNA, 25 bp, Homo sapiens
agttatgtcacaagaccatcggacc

SEQ ID NO: 6184 - DNA, 25 bp, Homo sapiens
tactgacgtaaacaccttcgatgac

SEQ ID NO: 6185 - DNA, 24 bp, Homo sapiens
acatagattgttcttgacctctct

SEQ ID NO: 6186 - DNA, 24 bp, Homo sapiens
cggcggtcgaggttactgatcttg

SEQ ID NO: 6187 - DNA, 24 bp, Homo sapiens
acaagaccatcggacccgtatcta

SEQ ID NO: 6188 - DNA, 24 bp, Homo sapiens
caagaccatcggacccgtatctac

SEQ ID NO: 6189 - DNA, 24 bp, Homo sapiens
cacaagaccatcggacccgtatct

SEQ ID NO: 6190 - DNA, 24 bp, Homo sapiens
gtaaacaccttcgatgacgtcctt

SEQ ID NO: 6191 - DNA, 23 bp, Homo sapiens
gagtcaccgtgtgtgtcgacgtt

SEQ ID NO: 6192 - DNA, 25 bp, Homo sapiens
gttacctcgaacctagattctgtgg

SEQ ID NO: 6193 - DNA, 25 bp, Homo sapiens
gctatgttcgtcagtaaggtccgtc

SEQ ID NO: 6194 - DNA, 25 bp, Homo sapiens
agttatgtcacaagaccatcggacc

SEQ ID NO: 6195 - DNA, 25 bp, Homo sapiens
aacaccttcgatgacgtccttacta

SEQ ID NO: 6196 - DNA, 25 bp, Homo sapiens
cgataaaatttttggagtcaccgtg

SEQ ID NO: 6197 - DNA, 25 bp, Homo sapiens
gctatgttcgtcagtaaggtccgtc

SEQ ID NO: 6198 - DNA, 25 bp, Homo sapiens
agttatgtcacaagaccatcggacc

SEQ ID NO: 6199 - DNA, 25 bp, Homo sapiens
tcgggtagatgtagtaatttgtggt

SEQ ID NO: 6200 - DNA, 24 bp, Homo sapiens
ttggtgtgcaaagacgggttacgc

SEQ ID NO: 6201 - DNA, 24 bp, Homo sapiens
tggtgtgcaaagacgggttacgct

SEQ ID NO: 6202 - DNA, 24 bp, Homo sapiens
attggtgtgcaaagacgggttacg

SEQ ID NO: 6203 - DNA, 24 bp, Homo sapiens
tcggaatgagttgtcaaggtaggt

SEQ ID NO: 6204 - DNA, 24 bp, Homo sapiens
agtagttcgtttcggttcgtgggt

SEQ ID NO: 6205 - DNA, 24 bp, Homo sapiens
ccagaaggtactaccacagccgtg

SEQ ID NO: 6206 - DNA, 24 bp, Homo sapiens
cattctacgtctgacaaccatcgg

SEQ ID NO: 6207 - DNA, 24 bp, Homo sapiens
attctacgtctgacaaccatcggt

SEQ ID NO: 6208 - DNA, 24 bp, Homo sapiens
acattctacgtctgacaaccatcg

SEQ ID NO: 6209 - DNA, 25 bp, Homo sapiens
aatgattcaattcgtagatcagtcg

SEQ ID NO: 6210 - DNA, 23 bp, Homo sapiens
tagactctttgttcggctaaacg

SEQ ID NO: 6211 - DNA, 25 bp, Homo sapiens
agtgagtttacaaagaacgataggg

SEQ ID NO: 6212 - DNA, 24 bp, Homo sapiens
cgaccctgacgtaagaagaccctc

SEQ ID NO: 6213 - DNA, 25 bp, Homo sapiens
tattagagaggatggtggaccgttt

SEQ ID NO: 6214 - DNA, 25 bp, Homo sapiens
agaagaactcccgttgaacagagac

SEQ ID NO: 6215 - DNA, 24 bp, Homo sapiens
cgtatcggtccgtttcctttatcg

SEQ ID NO: 6216 - DNA, 24 bp, Homo sapiens
tgttcacgaagaaaggcactgcgg

SEQ ID NO: 6217 - DNA, 24 bp, Homo sapiens
aaatccttgacttcggtgtcgtcc

SEQ ID NO: 6218 - DNA, 24 bp, Homo sapiens
gacgacaacgaactttagtccaga

SEQ ID NO: 6219 - DNA, 24 bp, Homo sapiens
aaccagaccccttcctcgtttcct

SEQ ID NO: 6220 - DNA, 24 bp, Homo sapiens
gtagtacggatgggtaaagagcca

SEQ ID NO: 6221 - DNA, 24 bp, Homo sapiens
tagtacggatgggtaaagagccaa

SEQ ID NO: 6222 - DNA, 24 bp, Homo sapiens
agtagtacggatgggtaaagagcc

SEQ ID NO: 6223 - DNA, 25 bp, Homo sapiens
tccttactcttatgacaacgatccg

SEQ ID NO: 6224 - DNA, 25 bp, Homo sapiens
aggtgaattaaaggcaggagacggt

SEQ ID NO: 6225 - DNA, 25 bp, Homo sapiens
caggtgagaagttgtagacagacga

SEQ ID NO: 6226 - DNA, 24 bp, Homo sapiens
gctaccacgcattccatactgaag

SEQ ID NO: 6227 - DNA, 24 bp, Homo sapiens
tacgactgacgggtactttccaaa

SEQ ID NO: 6228 - DNA, 24 bp, Homo sapiens
tggaacggtgcaagtaatgtgacg

SEQ ID NO: 6229 - DNA, 24 bp, Homo sapiens
tccagaacggtgtgagtgatgtga

SEQ ID NO: 6230 - DNA, 24 bp, Homo sapiens
gctaccacgcattccatactgaag

SEQ ID NO: 6231 - DNA, 24 bp, Homo sapiens
tggaacggtgcaagtaatgtgacg

SEQ ID NO: 6232 - DNA, 24 bp, Homo sapiens
tggaacggtgcaagtaatgtgacg

SEQ ID NO: 6233 - DNA, 24 bp, Homo sapiens
aaacctccgaactaaacgctgaca

SEQ ID NO: 6234 - DNA, 24 bp, Homo sapiens
atcctacaacacggtccacgctta

SEQ ID NO: 6235 - DNA, 24 bp, Homo sapiens
gtcgtcatgtcgctcttcggtcaa

SEQ ID NO: 6236 - DNA, 24 bp, Homo sapiens
acagaagttctctacctacgaccg

SEQ ID NO: 6237 - DNA, 24 bp, Homo sapiens
actattggaccgaagacgcagcac

SEQ ID NO: 6238 - DNA, 24 bp, Homo sapiens
taccgagcataagaccgtccttca

SEQ ID NO: 6239 - DNA, 24 bp, Homo sapiens
accgagcataagaccgtccttcat

SEQ ID NO: 6240 - DNA, 24 bp, Homo sapiens
ctaccgagcataagaccgtccttc

SEQ ID NO: 6241 - DNA, 25 bp, Homo sapiens
cccgttccctctacgagtaaaaaca

SEQ ID NO: 6242 - DNA, 25 bp, Homo sapiens
gtgaagaaaggtaagaaaaccgtcg

SEQ ID NO: 6243 - DNA, 23 bp, Homo sapiens
ggctgcacaggaccctagcgcga

SEQ ID NO: 6244 - DNA, 24 bp, Homo sapiens
tcttaatcgcacgtcacctcatgg

SEQ ID NO: 6245 - DNA, 24 bp, Homo sapiens
tgccaacaatgacgacatctgaca

SEQ ID NO: 6246 - DNA, 24 bp, Homo sapiens
ataaccgaatctcagccgtgaagg

SEQ ID NO: 6247 - DNA, 24 bp, Homo sapiens
tgccaacaatgacgacatctgaca

SEQ ID NO: 6248 - DNA, 24 bp, Homo sapiens
ataaccgaatctcagccgtgaagg

SEQ ID NO: 6249 - DNA, 24 bp, Homo sapiens
agaggctgtagatgaagaaggtgt

SEQ ID NO: 6250 - DNA, 24 bp, Homo sapiens
ataaccgaatctcagccgtgaagg

SEQ ID NO: 6251 - DNA, 24 bp, Homo sapiens
agaggctgtagatgaagaaggtgt

SEQ ID NO: 6252 - DNA, 24 bp, Homo sapiens
gttctccttgtactaagtggtccg

SEQ ID NO: 6253 - DNA, 24 bp, Homo sapiens
tccaaccgtcggcacccattctag

SEQ ID NO: 6254 - DNA, 24 bp, Homo sapiens
tagacaccaatgttcggctacaga

SEQ ID NO: 6255 - DNA, 24 bp, Homo sapiens
ggtagtgtcagttccaccgaagtt

SEQ ID NO: 6256 - DNA, 25 bp, Homo sapiens
cgttttagaaacatcgacgaccatg

SEQ ID NO: 6257 - DNA, 25 bp, Homo sapiens
cggtcgtgaacatttcgctaataaa

SEQ ID NO: 6258 - DNA, 25 bp, Homo sapiens
tttgtgtcctcccaccgacctaata

SEQ ID NO: 6259 - DNA, 24 bp, Homo sapiens
aagtctcataaggtccagcatcag

SEQ ID NO: 6260 - DNA, 24 bp, Homo sapiens
agtctcataaggtccagcatcagg

SEQ ID NO: 6261 - DNA, 24 bp, Homo sapiens
gaagtctcataaggtccagcatca

SEQ ID NO: 6262 - DNA, 24 bp, Homo sapiens
catgccgaaccggaggacactcag

SEQ ID NO: 6263 - DNA, 24 bp, Homo sapiens
atgccgaaccggaggacactcagt

SEQ ID NO: 6264 - DNA, 24 bp, Homo sapiens
acatgccgaaccggaggacactca

SEQ ID NO: 6265 - DNA, 24 bp, Homo sapiens
accgagcctcaatgatagaagtct

SEQ ID NO: 6266 - DNA, 24 bp, Homo sapiens
aaacctttgacgaattacggcgaa

SEQ ID NO: 6267 - DNA, 24 bp, Homo sapiens
cgtgaggcttatatccagttatcg

SEQ ID NO: 6268 - DNA, 24 bp, Homo sapiens
gtttaggtgtaaaccgagcctcaa

SEQ ID NO: 6269 - DNA, 24 bp, Homo sapiens
acgaaaccttaatatcatgactaa

SEQ ID NO: 6270 - DNA, 24 bp, Homo sapiens
acggcgaaaacccagtagaagaaa

SEQ ID NO: 6271 - DNA, 24 bp, Homo sapiens
ccagcatcaggaggagtagtagcg

SEQ ID NO: 6272 - DNA, 24 bp, Homo sapiens
accgagcctcaatgatagaagtct

SEQ ID NO: 6273 - DNA, 24 bp, Homo sapiens
acggcgaaaacccagtagaagaaa

SEQ ID NO: 6274 - DNA, 24 bp, Homo sapiens
ccagcatcaggaggagtagtagcg

SEQ ID NO: 6275 - DNA, 24 bp, Homo sapiens
accgagcctcaatgatagaagtct

SEQ ID NO: 6276 - DNA, 24 bp, Homo sapiens
aaacctttgacgaattacggcgaa

SEQ ID NO: 6277 - DNA, 24 bp, Homo sapiens
acttcgaaaggtataaggagagca

SEQ ID NO: 6278 - DNA, 24 bp, Homo sapiens
cgtggtcgttcgagaggtgtagtc

SEQ ID NO: 6279 - DNA, 24 bp, Homo sapiens
actaggtcaagttcctcaaccaac

SEQ ID NO: 6280 - DNA, 24 bp, Homo sapiens
atgactgatgtcggaccaactctc

SEQ ID NO: 6281 - DNA, 24 bp, Homo sapiens
actaggtcaagttcctcaaccaac

SEQ ID NO: 6282 - DNA, 24 bp, Homo sapiens
atgactgatgtcggaccaactctc

SEQ ID NO: 6283 - DNA, 24 bp, Homo sapiens
gtcctgtgtagttggctgtcatca

SEQ ID NO: 6284 - DNA, 24 bp, Homo sapiens
tatgtttatgtagcgggcgtcacc

SEQ ID NO: 6285 - DNA, 24 bp, Homo sapiens
cgagacccttcaaatgaggctccg

SEQ ID NO: 6286 - DNA, 24 bp, Homo sapiens
cgtgtagttatagcggagaagtgc

SEQ ID NO: 6287 - DNA, 24 bp, Homo sapiens
ggttagaagatttaagagtttcga

SEQ ID NO: 6288 - DNA, 25 bp, Homo sapiens
tgaggagcgagtgaaagaagtggtg

SEQ ID NO: 6289 - DNA, 23 bp, Homo sapiens
gccaggaccgagaggaggagtct

SEQ ID NO: 6290 - DNA, 25 bp, Homo sapiens
aaggaccgttacaataggaagagtt

SEQ ID NO: 6291 - DNA, 25 bp, Homo sapiens
aaacggaggataacagacgggagga

SEQ ID NO: 6292 - DNA, 24 bp, Homo sapiens
gacccgtagaaggcatctcaggta

SEQ ID NO: 6293 - DNA, 24 bp, Homo sapiens
acccgtagaaggcatctcaggtag

SEQ ID NO: 6294 - DNA, 24 bp, Homo sapiens
ggacccgtagaaggcatctcaggt

SEQ ID NO: 6295 - DNA, 23 bp, Homo sapiens
tcgactacataacgactaagttc

SEQ ID NO: 6296 - DNA, 23 bp, Homo sapiens
cagcagaaacctgttccgccctt

SEQ ID NO: 6297 - DNA, 25 bp, Homo sapiens
acttaccgaacttttgaggcttcta

SEQ ID NO: 6298 - DNA, 25 bp, Homo sapiens
tctacctgactgaacttaccgaact

SEQ ID NO: 6299 - DNA, 24 bp, Homo sapiens
ccgaacagatgctgctcaggagga

SEQ ID NO: 6300 - DNA, 25 bp, Homo sapiens
aagttccactagacggtagaatggc

SEQ ID NO: 6301 - DNA, 25 bp, Homo sapiens
caatcgtatctgtcctcttagaccg

SEQ ID NO: 6302 - DNA, 25 bp, Homo sapiens
aggttcaagaaaggacacagggaga

SEQ ID NO: 6303 - DNA, 25 bp, Homo sapiens
agactgaccgacattcttcacgaca

SEQ ID NO: 6304 - DNA, 25 bp, Homo sapiens
tagaagtctcctcgtcgtggtctct

SEQ ID NO: 6305 - DNA, 25 bp, Homo sapiens
ggaacaggaactagacttctaacac

SEQ ID NO: 6306 - DNA, 25 bp, Homo sapiens
accacctacgcttagtaaggacacc

SEQ ID NO: 6307 - DNA, 24 bp, Homo sapiens
tacctgtgcgtatagcacggaagc

SEQ ID NO: 6308 - DNA, 23 bp, Homo sapiens
gagccagacgccagtgttaggaa

SEQ ID NO: 6309 - DNA, 25 bp, Homo sapiens
tgaccaggtagtggagaataagtaa

SEQ ID NO: 6310 - DNA, 25 bp, Homo sapiens
actcaagaggttcaccagttatagt

SEQ ID NO: 6311 - DNA, 25 bp, Homo sapiens
tggttagaggagtgatgatggttgt

SEQ ID NO: 6312 - DNA, 25 bp, Homo sapiens
aaccgtcttaactactgtctaccct

SEQ ID NO: 6313 - DNA, 25 bp, Homo sapiens
tcccaattctgaaagaggttcggtt

SEQ ID NO: 6314 - DNA, 25 bp, Homo sapiens
aagaagaagtcaccctgttcacatt

SEQ ID NO: 6315 - DNA, 25 bp, Homo sapiens
gcctactcctactgtccttacgtcc

SEQ ID NO: 6316 - DNA, 24 bp, Homo sapiens
tgactaccaggacctctgacaacg

SEQ ID NO: 6317 - DNA, 25 bp, Homo sapiens
agacttctacggttcgcattcaacg

SEQ ID NO: 6318 - DNA, 24 bp, Homo sapiens
gcggagcctaatcttctgagagcg

SEQ ID NO: 6319 - DNA, 24 bp, Homo sapiens
agtcttgttgaacccatcgtcgga

SEQ ID NO: 6320 - DNA, 24 bp, Homo sapiens
aggcttcgatgagactcaggtgaa

SEQ ID NO: 6321 - DNA, 24 bp, Homo sapiens
acaaccgaacgaactgatctactc

SEQ ID NO: 6322 - DNA, 24 bp, Homo sapiens
agattggtgacgacttgctaacga

SEQ ID NO: 6323 - DNA, 24 bp, Homo sapiens
ctcacgggtagatgaactcactgg

SEQ ID NO: 6324 - DNA, 24 bp, Homo sapiens
accgttcgtataacgagtagtcta

SEQ ID NO: 6325 - DNA, 24 bp, Homo sapiens
gcttaccgtcgactaagaccgttg

SEQ ID NO: 6326 - DNA, 24 bp, Homo sapiens
gtgaaaggtaggactcgttggcgt

SEQ ID NO: 6327 - DNA, 24 bp, Homo sapiens
ccctgatacgacttggtggaacaa

SEQ ID NO: 6328 - DNA, 24 bp, Homo sapiens
agacggtctcacggactaggaagg

SEQ ID NO: 6329 - DNA, 24 bp, Homo sapiens
ttcttagaaggtacgggacgagac

SEQ ID NO: 6330 - DNA, 24 bp, Homo sapiens
caagtggaatatgagtaggtgtga

SEQ ID NO: 6331 - DNA, 24 bp, Homo sapiens
tgtaactttatgaaacgagacccg

SEQ ID NO: 6332 - DNA, 24 bp, Homo sapiens
acaggtgtccggagaagaaaagaa

SEQ ID NO: 6333 - DNA, 23 bp, Homo sapiens
cgtgtacttcaaccgcttcctaa

SEQ ID NO: 6334 - DNA, 25 bp, Homo sapiens
acctaaacctccgtcctactttcag

SEQ ID NO: 6335 - DNA, 25 bp, Homo sapiens
aagccagagaggaagacaaagaaga

SEQ ID NO: 6336 - DNA, 24 bp, Homo sapiens
cctagggttacggcgtcgaaggaa

SEQ ID NO: 6337 - DNA, 24 bp, Homo sapiens
ctagggttacggcgtcgaaggaac

SEQ ID NO: 6338 - DNA, 24 bp, Homo sapiens
ccctagggttacggcgtcgaagga

SEQ ID NO: 6339 - DNA, 24 bp, Homo sapiens
tgaaacttcgtagaaccgcgtcct

SEQ ID NO: 6340 - DNA, 24 bp, Homo sapiens
gaaacttcgtagaaccgcgtcctg

SEQ ID NO: 6341 - DNA, 24 bp, Homo sapiens
atgaaacttcgtagaaccgcgtcc

SEQ ID NO: 6342 - DNA, 24 bp, Homo sapiens
atgaagaaaatagtcgtcgggcct

SEQ ID NO: 6343 - DNA, 24 bp, Homo sapiens
tgaagaaaatagtcgtcgggccta

SEQ ID NO: 6344 - DNA, 24 bp, Homo sapiens
aatgaagaaaatagtcgtcgggcc

SEQ ID NO: 6345 - DNA, 23 bp, Homo sapiens
gtcctgtctgccgagtcttgcgt

SEQ ID NO: 6346 - DNA, 25 bp, Homo sapiens
ttagaggaccatttgaaaccacatc

SEQ ID NO: 6347 - DNA, 23 bp, Homo sapiens
tacttcgggtagtcggggtaagg

SEQ ID NO: 6348 - DNA, 25 bp, Homo sapiens
cggaatgaagaaaatagtcgtcggg

SEQ ID NO: 6349 - DNA, 24 bp, Homo sapiens
cgagtcttgcgtggtgtttagacg

SEQ ID NO: 6350 - DNA, 24 bp, Homo sapiens
ccagatgacggtgcttgttacgcc

SEQ ID NO: 6351 - DNA, 24 bp, Homo sapiens
tcgatgaagaaggacgtctgtatt

SEQ ID NO: 6352 - DNA, 24 bp, Homo sapiens
cgatgaagaaggacgtctgtattc

SEQ ID NO: 6353 - DNA, 24 bp, Homo sapiens
atcgatgaagaaggacgtctgtat

SEQ ID NO: 6354 - DNA, 24 bp, Homo sapiens
aagacagatgtagacgacactact

SEQ ID NO: 6355 - DNA, 24 bp, Homo sapiens
agacagatgtagacgacactacta

SEQ ID NO: 6356 - DNA, 24 bp, Homo sapiens
aaagacagatgtagacgacactac

SEQ ID NO: 6357 - DNA, 23 bp, Homo sapiens
ccctgtcacctgaacaaatctcg

SEQ ID NO: 6358 - DNA, 25 bp, Homo sapiens
tgtcgtagtgagaataggtagaagt

SEQ ID NO: 6359 - DNA, 25 bp, Homo sapiens
gaggttgttactgttactgtcacta

SEQ ID NO: 6360 - DNA, 25 bp, Homo sapiens
ttgcacttaagatgtctaaaacaaa

SEQ ID NO: 6361 - DNA, 25 bp, Homo sapiens
tgtttcgtaccttactgctgtcaca

SEQ ID NO: 6362 - DNA, 23 bp, Homo sapiens
ccctgtcacctgaacaaatctcg

SEQ ID NO: 6363 - DNA, 25 bp, Homo sapiens
tgaggtcaagtagagcatttcggtt

SEQ ID NO: 6364 - DNA, 25 bp, Homo sapiens
acgacaaagaaacacgagaaagaca

SEQ ID NO: 6365 - DNA, 25 bp, Homo sapiens
gaagggtaagactctcgacggtaaa

SEQ ID NO: 6366 - DNA, 25 bp, Homo sapiens
actctccaagtctcattcgttcacg

SEQ ID NO: 6367 - DNA, 25 bp, Homo sapiens
agtttctcgtttgacagtgaatggg

SEQ ID NO: 6368 - DNA, 25 bp, Homo sapiens
ttgtgtcctctgctactaactcacg

SEQ ID NO: 6369 - DNA, 25 bp, Homo sapiens
agagacgtacaacgaagatcaacca

SEQ ID NO: 6370 - DNA, 23 bp, Homo sapiens
cgacagaagaaaggactcctccg

SEQ ID NO: 6371 - DNA, 25 bp, Homo sapiens
aggaccctctcgaccaagttctaaa

SEQ ID NO: 6372 - DNA, 25 bp, Homo sapiens
tctaacgacaggtgctccaactctt

SEQ ID NO: 6373 - DNA, 25 bp, Homo sapiens
agagacgtacaacgaagatcaacca

SEQ ID NO: 6374 - DNA, 25 bp, Homo sapiens
aggaccctctcgaccaagttctaaa

SEQ ID NO: 6375 - DNA, 25 bp, Homo sapiens
acgtgagaaattaaacaagtacacc

SEQ ID NO: 6376 - DNA, 24 bp, Homo sapiens
tcggtcgacatagacccccattta

SEQ ID NO: 6377 - DNA, 24 bp, Homo sapiens
cggtcgacatagacccccatttag

SEQ ID NO: 6378 - DNA, 24 bp, Homo sapiens
gtcggtcgacatagacccccattt

SEQ ID NO: 6379 - DNA, 25 bp, Homo sapiens
ggtgttcaaagaacgtctgtagtgt

SEQ ID NO: 6380 - DNA, 25 bp, Homo sapiens
acattgacacggtgaaatcgagctt

SEQ ID NO: 6381 - DNA, 25 bp, Homo sapiens
ctagacggaaaagtctcgtagtatt

SEQ ID NO: 6382 - DNA, 24 bp, Homo sapiens
aaggagagatggacgcatagcaaa

SEQ ID NO: 6383 - DNA, 24 bp, Homo sapiens
acgaccactagtttcgagtaaacg

SEQ ID NO: 6384 - DNA, 24 bp, Homo sapiens
cgaccactagtttcgagtaaacgg

SEQ ID NO: 6385 - DNA, 24 bp, Homo sapiens
gacgaccactagtttcgagtaaac

SEQ ID NO: 6386 - DNA, 25 bp, Homo sapiens
ctgaacgatatgtgactgacgaccg

SEQ ID NO: 6387 - DNA, 25 bp, Homo sapiens
gattgtatgaccgaccgaactcagg

SEQ ID NO: 6388 - DNA, 25 bp, Homo sapiens
acacaggtagacgacagagcataag

SEQ ID NO: 6389 - DNA, 24 bp, Homo sapiens
acgtccataaccgtctcttaaaag

SEQ ID NO: 6390 - DNA, 24 bp, Homo sapiens
cgtccataaccgtctcttaaaaga

SEQ ID NO: 6391 - DNA, 24 bp, Homo sapiens
aacgtccataaccgtctcttaaaa

SEQ ID NO: 6392 - DNA, 25 bp, Homo sapiens
accttgttgccatagacgacacgac

SEQ ID NO: 6393 - DNA, 24 bp, Homo sapiens
tccttgggttcatccgacaaagac

SEQ ID NO: 6394 - DNA, 25 bp, Homo sapiens
gaaccgtcaagtatgtcaaacctcg

SEQ ID NO: 6395 - DNA, 24 bp, Homo sapiens
gatgatgtccgtgtatccgtgtag

SEQ ID NO: 6396 - DNA, 24 bp, Homo sapiens
atgatgtccgtgtatccgtgtagt

SEQ ID NO: 6397 - DNA, 24 bp, Homo sapiens
agatgatgtccgtgtatccgtgta

SEQ ID NO: 6398 - DNA, 25 bp, Homo sapiens
ccaaggacgagacagaccagtagga

SEQ ID NO: 6399 - DNA, 25 bp, Homo sapiens
acgacgacgaagaagaagtagatgt

SEQ ID NO: 6400 - DNA, 25 bp, Homo sapiens
ttaatcgttctagccagagcagagg

SEQ ID NO: 6401 - DNA, 25 bp, Homo sapiens
tcgcaagagtcttctaagtcgtgga

SEQ ID NO: 6402 - DNA, 25 bp, Homo sapiens
tatcagcaggaacaagagtagtgaa

SEQ ID NO: 6403 - DNA, 25 bp, Homo sapiens
tgtccttgtaacccgactataccag

SEQ ID NO: 6404 - DNA, 25 bp, Homo sapiens
ttaaggtaaaaggttgcgacgaagc

SEQ ID NO: 6405 - DNA, 25 bp, Homo sapiens
tcgcaagagtcttctaagtcgtgga

SEQ ID NO: 6406 - DNA, 25 bp, Homo sapiens
tatcagcaggaacaagagtagtgaa

SEQ ID NO: 6407 - DNA, 25 bp, Homo sapiens
accacgacctaaacatctgacgacg

SEQ ID NO: 6408 - DNA, 25 bp, Homo sapiens
tctactttactccctccacctccag

SEQ ID NO: 6409 - DNA, 25 bp, Homo sapiens
accagttggtaacggtaacgtagaa

SEQ ID NO: 6410 - DNA, 23 bp, Homo sapiens
ggactttggtttcccgaaaaaag

SEQ ID NO: 6411 - DNA, 25 bp, Homo sapiens
aagagtctgtccagttggaagtgtg

SEQ ID NO: 6412 - DNA, 25 bp, Homo sapiens
tcgcaagagtcttctaagtcgtgga

SEQ ID NO: 6413 - DNA, 25 bp, Homo sapiens
acatatcagcaggaacaagagtagt

SEQ ID NO: 6414 - DNA, 25 bp, Homo sapiens
ctataccaggttaagatatgagtag

SEQ ID NO: 6415 - DNA, 25 bp, Homo sapiens
ttaatcgttctagccagagcagagg

SEQ ID NO: 6416 - DNA, 25 bp, Homo sapiens
tcgcaagagtcttctaagtcgtgga

SEQ ID NO: 6417 - DNA, 25 bp, Homo sapiens
tatcagcaggaacaagagtagtgaa

SEQ ID NO: 6418 - DNA, 25 bp, Homo sapiens
gcaagagcttcggacaagaacttca

SEQ ID NO: 6419 - DNA, 24 bp, Homo sapiens
ttccagtccattgaacctttcggg

SEQ ID NO: 6420 - DNA, 25 bp, Homo sapiens
agttccttcttgaagacttgtcgaa

SEQ ID NO: 6421 - DNA, 24 bp, Homo sapiens
tcgatttttagggactcgttcgag

SEQ ID NO: 6422 - DNA, 24 bp, Homo sapiens
cgatttttagggactcgttcgaga

SEQ ID NO: 6423 - DNA, 24 bp, Homo sapiens
atcgatttttagggactcgttcga

SEQ ID NO: 6424 - DNA, 25 bp, Homo sapiens
gttcaaaccgttatcaaactgccgt

SEQ ID NO: 6425 - DNA, 25 bp, Homo sapiens
cgcatctcggctagaagttcaggaa

SEQ ID NO: 6426 - DNA, 25 bp, Homo sapiens
tcgttgtggtgaagtcagactgtac

SEQ ID NO: 6427 - DNA, 25 bp, Homo sapiens
gttcaaaccgttatcaaactgccgt

SEQ ID NO: 6428 - DNA, 23 bp, Homo sapiens
agtagaccaggtcccgcatctcg

SEQ ID NO: 6429 - DNA, 23 bp, Homo sapiens
aagtaagtggtcagccggtgtcg

SEQ ID NO: 6430 - DNA, 25 bp, Homo sapiens
cgtaggaaattcaaaagtcgagaga

SEQ ID NO: 6431 - DNA, 24 bp, Homo sapiens
cgcactgagtccgtatttagtcca

SEQ ID NO: 6432 - DNA, 25 bp, Homo sapiens
tgtgaagacgaattatagattgtca

SEQ ID NO: 6433 - DNA, 25 bp, Homo sapiens
acctagttcggacgagtatcttagt

SEQ ID NO: 6434 - DNA, 25 bp, Homo sapiens
gttcaaaccgttatcaaactgccgt

SEQ ID NO: 6435 - DNA, 25 bp, Homo sapiens
cgcatctcggctagaagttcaggaa

SEQ ID NO: 6436 - DNA, 25 bp, Homo sapiens
cgcatctcggctagaagttcaggaa

SEQ ID NO: 6437 - DNA, 25 bp, Homo sapiens
agaaagacaagtaagtggtcagccg

SEQ ID NO: 6438 - DNA, 24 bp, Homo sapiens
cgcactgagtccgtatttagtcca

SEQ ID NO: 6439 - DNA, 25 bp, Homo sapiens
ctttatagaccttcaagtgtcagtt

SEQ ID NO: 6440 - DNA, 25 bp, Homo sapiens
ggcttcctgttttactaacgtcttt

SEQ ID NO: 6441 - DNA, 24 bp, Homo sapiens
taggcgacaaaaagaagtctgttg

SEQ ID NO: 6442 - DNA, 24 bp, Homo sapiens
ttctcgcctagtctaccgtcaagc

SEQ ID NO: 6443 - DNA, 25 bp, Homo sapiens
tcttggacacaggtgatgtaacagt

SEQ ID NO: 6444 - DNA, 25 bp, Homo sapiens
accgttatggcagtaggagtcgtta

SEQ ID NO: 6445 - DNA, 24 bp, Homo sapiens
gtaccaggtagtcgagctgcttcc

SEQ ID NO: 6446 - DNA, 25 bp, Homo sapiens
ttgcggtggcttttacatagggtcc

SEQ ID NO: 6447 - DNA, 25 bp, Homo sapiens
tcacgaagatacccaagcagacaca

SEQ ID NO: 6448 - DNA, 25 bp, Homo sapiens
ttacacgacttgtttacacggttgt

SEQ ID NO: 6449 - DNA, 25 bp, Homo sapiens
atgttccacaagagaggaccaccgt

SEQ ID NO: 6450 - DNA, 25 bp, Homo sapiens
ttaagaagtaacacggtccgacagg

SEQ ID NO: 6451 - DNA, 25 bp, Homo sapiens
aaacgaagattaccattagacggga

SEQ ID NO: 6452 - DNA, 25 bp, Homo sapiens
gatcataagacagtcaaacgggtcg

SEQ ID NO: 6453 - DNA, 23 bp, Homo sapiens
ggctttacacgtcgccgaggcct

SEQ ID NO: 6454 - DNA, 24 bp, Homo sapiens
taagtgtgatacctgttcggcgtc

SEQ ID NO: 6455 - DNA, 25 bp, Homo sapiens
ccgtcgcagacatactggtcaagtc

SEQ ID NO: 6456 - DNA, 24 bp, Homo sapiens
acccgttgtgtcaaaacgagcctc

SEQ ID NO: 6457 - DNA, 24 bp, Homo sapiens
cccgttgtgtcaaaacgagcctcc

SEQ ID NO: 6458 - DNA, 24 bp, Homo sapiens
cacccgttgtgtcaaaacgagcct

SEQ ID NO: 6459 - DNA, 24 bp, Homo sapiens
accaggaggtgactcaaccgtagt

SEQ ID NO: 6460 - DNA, 24 bp, Homo sapiens
gagaagtaacagagaaacccgtcg

SEQ ID NO: 6461 - DNA, 24 bp, Homo sapiens
cgtagagttcaagtaggagtaggt

SEQ ID NO: 6462 - DNA, 24 bp, Homo sapiens
ttaaacaatacggtctaaggagcc

SEQ ID NO: 6463 - DNA, 24 bp, Homo sapiens
acaaccactgtaacatgagtctgt

SEQ ID NO: 6464 - DNA, 24 bp, Homo sapiens
ccacaagcaccacaagattctcgt

SEQ ID NO: 6465 - DNA, 24 bp, Homo sapiens
cgtagactttagactccccgtcct

SEQ ID NO: 6466 - DNA, 24 bp, Homo sapiens
acaaccactgtaacatgagtctgt

SEQ ID NO: 6467 - DNA, 24 bp, Homo sapiens
ccacaagcaccacaagattctcgt

SEQ ID NO: 6468 - DNA, 24 bp, Homo sapiens
ccgacccgatctcttcccactact

SEQ ID NO: 6469 - DNA, 25 bp, Homo sapiens
ggacagacgacggttacctcaactt

SEQ ID NO: 6470 - DNA, 24 bp, Homo sapiens
cgacggtccacatctgactcttaa

SEQ ID NO: 6471 - DNA, 24 bp, Homo sapiens
aaggagaccgtatacgtcgtcatt

SEQ ID NO: 6472 - DNA, 24 bp, Homo sapiens
aggagaccgtatacgtcgtcatta

SEQ ID NO: 6473 - DNA, 24 bp, Homo sapiens
caaggagaccgtatacgtcgtcat

SEQ ID NO: 6474 - DNA, 25 bp, Homo sapiens
tactcgaaggtccaagtctagtctt

SEQ ID NO: 6475 - DNA, 25 bp, Homo sapiens
tcgtcattcagttactacaccttgt

SEQ ID NO: 6476 - DNA, 25 bp, Homo sapiens
gagacgggacatagagaaaccttcg

SEQ ID NO: 6477 - DNA, 24 bp, Homo sapiens
tagtgtcgaaggaaaacccggtaa

SEQ ID NO: 6478 - DNA, 24 bp, Homo sapiens
agtgtcgaaggaaaacccggtaac

SEQ ID NO: 6479 - DNA, 24 bp, Homo sapiens
ttagtgtcgaaggaaaacccggta

SEQ ID NO: 6480 - DNA, 24 bp, Homo sapiens
ggtaagtggacagaactacacgtc

SEQ ID NO: 6481 - DNA, 24 bp, Homo sapiens
gtaagtggacagaactacacgtct

SEQ ID NO: 6482 - DNA, 24 bp, Homo sapiens
aggtaagtggacagaactacacgt

SEQ ID NO: 6483 - DNA, 25 bp, Homo sapiens
gtcttgtcttggaggtgaatcgtcg

SEQ ID NO: 6484 - DNA, 25 bp, Homo sapiens
gaagagcctcatagcatcgttacca

SEQ ID NO: 6485 - DNA, 25 bp, Homo sapiens
agacatgactcggtagaagaggttc

SEQ ID NO: 6486 - DNA, 25 bp, Homo sapiens
actaccgtaactgagtaccgaactt

SEQ ID NO: 6487 - DNA, 25 bp, Homo sapiens
gtcttgtcttggaggtgaatcgtcg

SEQ ID NO: 6488 - DNA, 25 bp, Homo sapiens
gaagagcctcatagcatcgttacca

SEQ ID NO: 6489 - DNA, 24 bp, Homo sapiens
gataaccgtttggactcctgaggc

SEQ ID NO: 6490 - DNA, 24 bp, Homo sapiens
ataaccgtttggactcctgaggcc

SEQ ID NO: 6491 - DNA, 24 bp, Homo sapiens
ggataaccgtttggactcctgagg

SEQ ID NO: 6492 - DNA, 25 bp, Homo sapiens
tgacaagagaacgactaagacgaag

SEQ ID NO: 6493 - DNA, 23 bp, Homo sapiens
gggtcgataaaccagtacgtcta

SEQ ID NO: 6494 - DNA, 25 bp, Homo sapiens
gacagagatcaagaacaaacctacg

SEQ ID NO: 6495 - DNA, 24 bp, Homo sapiens
cccgtagtggtagaaactcttcag

SEQ ID NO: 6496 - DNA, 24 bp, Homo sapiens
ccgtagtggtagaaactcttcagg

SEQ ID NO: 6497 - DNA, 24 bp, Homo sapiens
acccgtagtggtagaaactcttca

SEQ ID NO: 6498 - DNA, 24 bp, Homo sapiens
caacgagtttgtgacttatcgact

SEQ ID NO: 6499 - DNA, 24 bp, Homo sapiens
aacgagtttgtgacttatcgactc

SEQ ID NO: 6500 - DNA, 24 bp, Homo sapiens
acaacgagtttgtgacttatcgac

SEQ ID NO: 6501 - DNA, 25 bp, Homo sapiens
ttagaatcgtgtgagtcctgtttga

SEQ ID NO: 6502 - DNA, 25 bp, Homo sapiens
tacccgttaccttcacagttcattg

SEQ ID NO: 6503 - DNA, 25 bp, Homo sapiens
ttgattcatttgaaggttccacgca

SEQ ID NO: 6504 - DNA, 25 bp, Homo sapiens
tgagtcattcacctccacacaacga

SEQ ID NO: 6505 - DNA, 25 bp, Homo sapiens
ttgaaaggtctggtgtaaacgaact

SEQ ID NO: 6506 - DNA, 25 bp, Homo sapiens
tgtcaagaactgtcagaacgacgac

SEQ ID NO: 6507 - DNA, 24 bp, Homo sapiens
catttggccattgacttatcgact

SEQ ID NO: 6508 - DNA, 24 bp, Homo sapiens
atttggccattgacttatcgactc

SEQ ID NO: 6509 - DNA, 24 bp, Homo sapiens
tcatttggccattgacttatcgac

SEQ ID NO: 6510 - DNA, 25 bp, Homo sapiens
acaaaggttaaaacccctgttggtg

SEQ ID NO: 6511 - DNA, 23 bp, Homo sapiens
actgtttcgtctgttacgacatg

SEQ ID NO: 6512 - DNA, 25 bp, Homo sapiens
aaagaaacaccgaacgactacaaga

SEQ ID NO: 6513 - DNA, 25 bp, Homo sapiens
tcgttagtctaatatcgccgttcct

SEQ ID NO: 6514 - DNA, 24 bp, Homo sapiens
atcacaggaggagggtagggaggt

SEQ ID NO: 6515 - DNA, 25 bp, Homo sapiens
tcgttagtctaatatcgccgttcct

SEQ ID NO: 6516 - DNA, 24 bp, Homo sapiens
atcacaggaggagggtagggaggt

SEQ ID NO: 6517 - DNA, 25 bp, Homo sapiens
acgacgaaacctgtgttaaaccaga

SEQ ID NO: 6518 - DNA, 24 bp, Homo sapiens
accagtagtatggcacgaagaaaa

SEQ ID NO: 6519 - DNA, 24 bp, Homo sapiens
ccagtagtatggcacgaagaaaat

SEQ ID NO: 6520 - DNA, 24 bp, Homo sapiens
aaccagtagtatggcacgaagaaa

SEQ ID NO: 6521 - DNA, 25 bp, Homo sapiens
cttggtgtcttgtgctttaacgagt

SEQ ID NO: 6522 - DNA, 23 bp, Homo sapiens
cgaacggttcctccttccttcaa

SEQ ID NO: 6523 - DNA, 25 bp, Homo sapiens
acaaaccagtagtatggcacgaaga

SEQ ID NO: 6524 - DNA, 25 bp, Homo sapiens
gtcgaaacacagtacagaacgtctt

SEQ ID NO: 6525 - DNA, 25 bp, Homo sapiens
acaaaccagtagtatggcacgaaga

SEQ ID NO: 6526 - DNA, 25 bp, Homo sapiens
tcaatccagccgtacaactcacctt

SEQ ID NO: 6527 - DNA, 23 bp, Homo sapiens
ccataggtgtaggtagcgacggc

SEQ ID NO: 6528 - DNA, 25 bp, Homo sapiens
cgtctaccgtgtcaatagttggtgt

SEQ ID NO: 6529 - DNA, 25 bp, Homo sapiens
catgtgagaagacttcatcgcctgc

SEQ ID NO: 6530 - DNA, 24 bp, Homo sapiens
aacgctagaaaggacttttaccat

SEQ ID NO: 6531 - DNA, 24 bp, Homo sapiens
acgctagaaaggacttttaccata

SEQ ID NO: 6532 - DNA, 24 bp, Homo sapiens
aaacgctagaaaggacttttacca

1-21. (canceled)

22. A method for detecting the presence of Alzheimer's disease in a mammal, comprising contacting, under conditions allowing hybridisation between complementary sequences, nucleic acids from a blood sample from the mammal and a set of probes to obtain an expression profile, the expression profile being characteristic of the presence of Alzheimer's disease in the mammal, the set of probes comprising:
at least one probe comprising all or part of SEQ ID NO: 34 or of the complement thereof;
at least one probe comprising all or part of SEQ ID NO: 230 or of the complement thereof;
at least one probe comprising all or part of SEQ ID NO: 341 or of the complement thereof;
at least one probe comprising all or part of SEQ ID NO: 454 or of the complement thereof;
at least one probe comprising all or part of SEQ ID NO: 664 or of the complement thereof;
at least one probe comprising all or part of SEQ ID NO: 811 or of the complement thereof;
at least one probe comprising all or part of SEQ ID NO: 951 or of the complement thereof;
at least one probe comprising all or part of SEQ ID NO: 1127 or of the complement thereof;
at least one probe comprising all or part of SEQ ID NO: 1136 or of the complement thereof; and
at least one probe comprising all or part of SEQ ID NO: 1752 or of the complement thereof,
wherein said part comprises at least 15 consecutive nucleotides of SEQ ID NO: 34, 230, 341, 454, 664, 811, 951, 1127, 1136 or 1752 or at least 15 consecutive nucleotides of the complement of SEQ ID NO: 34, 230, 341, 454, 664, 811, 951, 1127, 1136 or 1752.

23. The method according to claim 22, wherein the set of probes further comprises:
at least one probe comprising all or part of SEQ ID NO: 35 or of the complement thereof;
at least one probe comprising all or part of SEQ ID NO: 316 or of the complement thereof;
at least one probe comprising all or part of SEQ ID NO: 593 or of the complement thereof;
at least one probe comprising all or part of SEQ ID NO: 666 or of the complement thereof;
at least one probe comprising all or part of SEQ ID NO: 855 or of the complement thereof;
at least one probe comprising all or part of SEQ ID NO: 1330 or of the complement thereof; and
at least one probe comprising all or part of SEQ ID NO: 1498 or of the complement thereof,
wherein said part comprises at least 15 consecutive nucleotides of SEQ ID NO: 35, 316, 593, 666, 855, 1330 or 1498 or at least 15 consecutive nucleotides of the complement of SEQ ID NO: 35, 316, 593, 666, 855, 1330 or 1498.

24. The method according to claim 22, wherein the set of probes comprises at least one probe specific for each nucleic acid, or the complement thereof, of one of panels 1 to 14 defined in table 2, or of a distinctive fragment thereof having at least 15 consecutive nucleotides.

25. The method according to claim 22, wherein the set of probes comprises, for each target nucleic acid, a group of 1 to 3 specific probes that, optionally, overlap.

26. The method according to claim 22, wherein the probes are immobilised on support.

27. The method according to claim 22, wherein the expression profile is analysed by computer software methods.

28. The method according to claim 22, wherein the sample is a sample of whole blood.

29. A product comprising a support on which a set of probes is immobilised, the set comprising:
at least one probe comprising all or part of SEQ ID NO: 34 or of the complement thereof;
at least one probe comprising all or part of SEQ ID NO: 230 or of the complement thereof;
at least one probe comprising all or part of SEQ ID NO: 341 or of the complement thereof;
at least one probe comprising all or part of SEQ ID NO: 454 or of the complement thereof;
at least one probe comprising all or part of SEQ Ill NO: 664 or of the complement thereof;
at least one probe comprising all or part of SEQ ID NO: 811 or of the complement thereof;
at least one probe comprising all or part of SEQ ID NO: 951 or of the complement thereof;
at least one probe comprising all or part of SEQ ID NO: 1127 or of the complement thereof;
at least one probe comprising all or part of SEQ ID NO: 1136 or of the complement thereof, and
at least one probe comprising all or part of SEQ ID NC): 1752 or of the complement thereof,
wherein said part comprises at least 15 consecutive nucleotides of SEQ ID NO: 34, 230, 341, 454, 664, 811, 951, 1127, 1136 or 1752 or at least 15 consecutive nucleotides of the complement of SEQ ID NO: 34, 230, 341, 454, 664, 811, 951, 1127, 1136 or 1752.

30. A product comprising a support on which are immobilised at least two distinct nucleic acid probes, each probe comprising a sequence complementary to and/or specific to a target nucleic acid selected from SEQ ID NOS.: 1-1754 or the complement thereof.

31. The product according to claim 30, comprising a support on which are immobilised at least one set of distinct nucleic acid probes comprising a sequence complementary to and/or specific to the nucleic acids of any one of panels 1 to 14 defined in table 2.

32. The product according to claim 30, comprising a support on which are immobilised probes complementary to and/or specific for each of the 170 nucleic acids of PANEL 10 or the complement thereof.

33. The product according to claim 30, comprising a support on which are immobilised probes complementary to and/or specific for each of the 150 nucleic acids of PANEL 12 or the complement thereof.

34. The product according to claim 30, comprising a support on which are immobilised probes complementary to and/or specific for each of the 120 nucleic acids of PANEL 13 or the complement thereof.

35. The product according to claim 30, comprising a support on which immobilised probes complementary to and/or specific for each of the 250 nucleic acids of PANEL 14 or the complement thereof.

36. The product according to claim 30, wherein the probes are selected from SEQ. ID NOS.: 1755-6532.

37. A kit comprising a compartment or container comprising at least 5 distinct nucleic acids selected from SEQ ID NOS.: 1-6532.

38. A kit comprising a product according to claim 29 and reagents for a hybridisation reaction.

39. A method to detect the presence of Alzheimer's disease in a mammal, comprising contacting, under conditions allowing an amplification reaction, nucleic acids from a blood sample from said mammal and a set of primers, the set of primers comprising primers comprising all or part of each of the following target nucleic acid sequences, or of the complement thereof SEQ ID NOS.: 34, 230, 341, 454, 664, 811, 951, 1127, 1136 and 1752, to obtain an amplification profile or product, the amplification profile or product being characteristic of the presence of Alzheimer's disease in said mammal.
